United States Patent Application Publication US 2025/0051766 A1 - sequence listing, part 10

SEQ ID NO: 5065 - DNA, 58617616 bp, Homo sapiens (residues 17,368,185-19,539,207 of 58,617,616)
  source 1..58617616: mol_type = genomic DNA
cctcagtctccctagtagctgggattacaggcacgcaccaccatgcttggctaatattgtattttttagtagagacagggtttctccatgttggccaggctggtctcaaactcccatcctcaggtgatccgcccacctcggcctcctaaagtgctaggattacaggtgtgagccaccgcactcggccgaactaatttttgtatttttagtagagacagggtttcaccatgttggccaggctggtttcaaactcctgacctcaggtgattcgcccccctcggcctcccaaagtgctgggattatagtcgtgagccacctctcctggcagaagtagggtctttagagaggtaattaagttaaggtgaggtccttagggtgggtcctaatccaacatgactgatgtccttataaagagaagagatttggacacagagacacggacagaaggaagaccaagagcagacacaggaagaagatgccacctgcaagccaagtagaaagacctggaacaggccggctatggtggctcacgcctgtaatcccagcactctgggaggccaaggcgggtggatcacgaggtcaagagttcaagagcaacctggccaagatggtgaaatcccatctctactaaaaatacaaaaaaattagcagggcatgttggtgggcacccgtaatctcagctactggggaggctgaggcagagaattgcttgaactcggggaggcggaggttgcagtgagccgagatcgcgtctctgcactccagtccagcctgggtgacagagcgagactccgtctcaaaaaaacaaacaaacaaacaaaaacctggaacagatccttccctcacagcctcagaaggaaccaaccccgctaacactttgatcttggtaccacccagtctgtaataccttgtcatggaagccctagcaaattaatacaaatgctaacaccatctcatgaggcaaacaacagtctttaaaaaaaacctttttttgtttttttttttgttgttgtttttgagacagggttttttgctctgtcacccagcctggagtgcagtggcacgatctcggctcactgtaacctccgtctcccgggttcaagtgattccccagcctcagcctctcgagtagctgggattacaggtgtgcaccaccatacctggctaatttttgtatttttagtagagacagggtttcgccatgttggccaggctggtctcgaactcctaacctcaagtgatctgcccaccaccagcctggccaacatggcgaaaccccatctttgctaaaaatacaaaaattagccaggcatggaagcgcatgcttgtagtcccagctatttgggagtctgagccaggagactcgcttgaatccgggaggcggaggttgcagtgagatgagattgtgccaccacactccaacctggggaacagagtgagactctatgtccaaaaaaaaaaaaaagaaaaattaaaattaaattaaataagatatgcaaatggccaaagagcatatcaaaagacattcaaaatcggctgggcgcggtggctcacacctataatcccagcactttgggaggccaagacaggtggatcacctgaggttgggcattcgagaccagcctggccaacatggtgaaaccccatctctactaaaaatacaaaaaaattagccaggcctggtggcaggtgcctgtaatcccagctacttgggaggctgaggcagaagaattgcttgaacccgggagatggaggttgcagtgagccacgatcacaccattgcactccagcctgggtgacagagcgagagtctgtctaaaaaaaaaaaaaaaaaaaaaaaaagaaagatattcaaaatcattagccattacggaaatgcaaatcaggaccacagtgagataccactacacacccacgagggtggctattttaaaaacccataaacccccaaaatgaacagtaacaggtgttgatgaggatgtggggaaatcagaattctcagacagtactagtgagaatgtacaatgttgcaacggctttgggaaagtctggcagttcctcaaaatgttaaacatagttaccacgtgacccagaaactctacttctcagcatatacccagagcaatggaaacacatcctcacatcaacttgccaggaatgtccacagccgctcgattcacagtagccaaaggtggaaagaacccaaatgcctgtcagcagatgaattaacgcacaaaatgtgttccttccatacatagaacatgattcagccataaaaaggaaggaagcactgatccatgttgcagtgtgtgtgaaccccaaaaacatgatgcctaagtgagagaagccggacacaaaaggccacagaatgtgagattccactgacatgaaatgcccagaacaggcaaatccatagagacaggaagcaggttggtggctgtcagggattgggggaggggaatgggaagtgactgctgatggggacgtgggttttcttttgggaaggtgaaaatgttctaaaataatgttctaaaatggatcgtggtgatcaatgtacaactctgtgaatttacaaaaaaatcatcaaattggctgggcgcggtggctcacgcctgtaatctcagcactttgggaggccgaggcgggcggatcacgaggtcaggagatctagaccatcctggctaacacggtgaaaccccatctctactaaaaatacaaaaaattagccaggcgtggtggcgggcgcctgtagtcccagctactcgggaggctgaggcaggagaatggcgtgaacctgggaggcagagcttgcaatgagctgagatcgcgccactgcactccagcctgggcgacagagcgagactccatctcaaaacaaacaaacaaacaaacaaaaacatcaaattgtacactttaaataggtggattgtaaaatacatgaattatatatcaataaagctgtttttaaaaattatttattattattattattattgagatggagtctcgctctgtggcccaggctagagtgcagcggtgtgatctcagctcactgcaacctctacttcctgggttcaagtgattctcatgcctcagcctcccaagtagctgggaatacaggggtgcaccaccatgaccagctaatttttgtattttagtagagacggggttgcaccatgttagccaggtggtttcgaactcctgacctcaagtgatccactggcctcagtctcctgccttgacttcccaaagtgctggaattacagacgtgagctgccacgcccggccagctatttttattttaatttaattttattttttttgagacatggtctcactctgccacccaggctggagtgtggtggtgtgatcacagctcactgcagcctcagcctccccaggctcgggcaatcctcccacctcagtctctcaagtagctgggattacaggcacgtgccaccactcctggctaattttttatagagatggggtctcaccatgttgcccaggctggtcttaaactgctgagctcaagcaatccacccaccttggcctcccaaaatgttgggattacaggtgtgaaccaccacgcctggccagcaaagctgtttttaaagaaagtgttcacaatttaacaaactaaagccatgcctttcaaactttggaagagaaccctctgcagaaatataataagacatgaagaatcaggagagtttgtctttctgcaactctctgtccttcatccttttgcagttggccctgggtgaatgtcctggggggacatggggaatgccttctgttctcaaaagccttagtcattaggaggctgaggtgggaacactgcttgaggctgggagttcgagaccagcctcggcaatgtagtgacaccatgtctctaaaaaaaaaaaaaaaaaaaaaggatgtgatttttaagtttcttttttaatttttagtttattttttatagagaagaggtgtcttgggaggctgaggcaggtggatcacctgagatcaggagttccagaccagcctggccaacatggggaaaccccatctctactaaaaatacaaaaaattagctgggtttggtggcgggtgcctgtaatcccagctactcgggaggctgaggtaggagaatcacttgaacccgggaggcagaggttgtagggagctgagattgcgccactgcaatccagcctgggcgacagagtgaaactctgtgtcaaaaatagtaataataataataaaataattaaataatgtttttatttatttatttatttattttttgagacggagtctcgctctgtcgcccaggctggagtgcagtggcgcaatctcggctcactgcaagctccgcctcccgggttcatgccattctcctgcctcagcctcccgagtagctgggactacaggcgcccaccaccacacctggctaatttttcgtatttttagtagagacggggtttcactgtgttagccagcatggtctcgatctcctgacctagtgatccacccacctcggcctcccgaagtgttgggattataggtgtgagccactgcacccggccaataatttttttttaaatgaaaagacaggccaggtgcagtggctcacacctgtaatcccagcactgggaggccaaggcgggcggatcacgaggtcaggaaattgaggccatcctggttaacatagtgaaaccccgtctctactaaaaatacaaaaaaaaaattagcagggcatgttggcgggcacctgtagacccagctactcgggaggctaaggcaggggaattgcttgaacccaggaggcagaggttgcagtgagtggataccgcgccattgcaccccagccttggcgacagagctagactctgtctcaaaaaaaaaaaaaaaaaaaaaaaaaaaagaaagaaaagacaccagttagccaggttcaggtctgagaggggaggcagggctctaatctgaggatctaaggggcaggcaggaccctattgggagggtctgagggaggggcacagttatgccctggggactgaggggtgttccaccccatcttggggggctgaggtgagacctaccatactctgggcatctggggagacggtgctttgccccggggttttggcggatagagacagggccctacccctggggctctgggcgaggggttgaggtggaggtagggccccgccattaggggtctgaggtgaggagactgagttctgccttgagcaggactgagggggctgagcttaccttcctgcccagtgcggacggctgggtggtctgaggtcctatgggaggtctgtctttgccactgcctgggccctggccagccaggtcacctccttggaagaccctgaagctgcctcttcagccttccctcaccccaccctcccatctctcacccacctcacccttaaggagagagccccacacctgctccccacaatgtctcagggcaggcgggacaccccctggatgaagttgtgtctgagaacacggggataattgtctagtgagtttgacacaagccggggtgcgagagtggcgcgatggtctccaggagaccccagatttgcagctgtgactttgcccagagagcccgcctgtttctgccacctcaagaaagtcacctcccctctcatgccttcactttcctgcctgcaaagggtttaaaacttctgctgcccaggcgcaatggctcactcctgtaatctcaacactttgggaggccaaggcaggtggatcacttgaaggcaggagtttgagaccagcctggccaacatggtgaaaccccatctctactaaaaatacaaaacttagccgggcatggtggggcgcacctgcaatcccagctactcgggaggctgaggcaacagaatcgcttgagcctgggaggcagtggttgcagtgagccgagaccttccactgcactccagccttggcaacagagggagaccctgtctcaaacaaaacaaaataaaacaaaacagccgggaacggtggctcacgcctgtaatcccagcactttgggaggccgaggcgggtggatcacagggtcaggagatccagaccatcctggctaacacagtgaaacccggtctctactaaaaatagaaaaattagccaggcatgacggcgggcgcctgtagtcccagctactcaggaggttgaggcaggagaatggtatgaacgcagaaggtggggcttgcagtgagccgagactgcgccactgcactccagcctgggtgaaagagtgagactccatctcaaacaaaacaaaacaacaaaagcttctccctacttcccgggatttggcaatgagttaatatttctaaattcaacacccagcatacagcaaatatggactgtttatacatgctagaattgaacaggaacaaaacactgtgaacttttattcagtccatcctttttttgtttttttttttccattcagggtctcactcagtcgcccaggctggagtacagtggcactatcttggctcactgcagccttgacctcctgggctcaagtgatcctcccacctcagcctcccaagtagctgggactactggcatgtgccaccatgcctgactaatttttgtatgtatgtatgtatgtatgtatgtatgtatttatttttagacagagtctccctctgttgcccaggctggagtgcagtagtgagatctcggctcactgcaatctctgcctcccaggttcaagtgattctcctgcctcagcctcccgagtagctgggactacaggcacataccaccatacccggctaataatttttgtatttttagtacagacggggtttcactaggttggccaggctggtctcaaatttctgacctcaagtgatccacccaccttggcctctcacagtgctgggattacaggtgttagccagtatgcctggcctaatttttgtactttttgtacagacagggtttcaccatgttgcccaggttggtctcaaattcctggactcaggtggtcctcctgcctcggtctcccaaagtgctgggattacaggtgtgagctactgtagccggtcttcagccacttatttgcagcttgtgtgtgctggacccctttgattagtgctggcacattctgggagcttcatgcatagtaagttatgggctcaggactgccaattaacacacaggaggagaattaaacttggattccaaaaagacaatgaatattattttcaaaattatatctcaaatattgcatggaatatacttacagtttaaaaaaaatgttgctggctgggaatggtggctcatgcctgtaatctcagcactttaggagggtgagcctaggagttcaagaccagcctcagcagcatagtgagattctgtctctaaaaaaaagttagccagggcaccaggtcagggcacggtggctcatgcctgtaatcccagcactatgggaggccgaggtgggtggctcacttgaggtcaggagtttgagaccagcctggcaaacatggtgaaaccccgtctctactaaaaatacaaaaattagctggcatggttgcacacgcctgtaatcccagctactcaggaggctgaggcaggagaatcacttgaacctgggaggtggaggttgcagtgaggcgagattgtgccactgcacttcagcctgggtgacagagcgagactccgtctcaaaaaaaaaaaaaaaaattgccaggtgtggtggtgcccacctgtaatctcagcactttgggaggtccaggagggaggattgtttgagcccaggagttcaagaccagcctgatcaacatagcgagaccccacgtctactaaaaataaaaaatgacctgggcatagtggcatgtccatagtgccagctactcaaaaggctgaggcaggaggattgctggagcccaggatgtcaaggcttcagtgagctatgctcacatcactgtgctccagcctgggtgacagagtgagaccctgcctccaaaaaaaagaaaagaaataaaaaaaatttagctggacgcagtgccccacacctgtaatcccagcagtttgggaggctggggtgagaggattgcttgagcccaggagttcgagactagcctgggcaacatagtgagacctcatctctgctaaatataaacatattagctgggtgtggtggtgcacgcctgtagtcccagctactcaggaggctgaggcaagaggatcacttgagtccaggagattgaggttgcagtgagctgtgatagcaattgcactccatccagcccaggatacacatggagaccctgtctcttaaggaaaaaaaaaaaatctatcggccgggtgcagtggctcacgcttgtaatcccaacaatttgggaggccaaggcaggcgtatcacttgaggtcaggagtttgagaccagcctggccaacatggtgaaaccccatctctactaaaaatacaaaaatgagccggttatgatggcacatgcctgtaatcccagctactcgggaggctgaggcaggagaatcactccaacccaggaggcagaggttgcagtgagccgagattgcaccactgcactccagcctgggagacggagcgagactctgtctcataagaaaagagagcattggtcctgtgatcgtccccctctcttggatgaggaaactcaggctcagagaggtgagggggcttgctcagggtccccagggcgagtgtcctgcccacagccttacccggtcaccctggcactggcggaagctggcattgatgcggtccaggtcgcggcgagcattcagccacatctgcatgatggcatccttggcgcgggtggtgaagttgagctccttggtcaagttggactgggaggccgtgagccctaggagctgactgtataggccctcggctcggcgctcggtggcctgcaggttggactctgtgctcacgtgcacgttgccatagaccatgaagagcacgagccccaggatgatgaggaattggatgagggagacgaagaggaagaagtagcgcaggtaataccagcagccccgagagctgccccccgcccgagcgtaggaccctccgtgctccatggccagacccatttgctcgatcccgccgtccggtgcaccgtccctgctcaccaccaggcctgctctggcccccgcctcgcaggggggagtgcttatattactcctcttaatacttcctctgcctggctccttcctggcccggaggaaacgggggctgcgggttatcacaacactcccactctggctgtgagaaggcgggggtggggctgggggcccagagccagggcaccggctggacccctctgattaatgctgggtggggcgctggctggctggtcaggcattcctggcctcttcgagcctcgcgttcgcctttacttgctggcgggtgctgttctcagtacctgctgtgattaggtcgctgaatcatgccaggtctgttgctgtctcccttgtgtggcggaggaaactgaggcacagggaggagaaggggttgcctcggggtctcacgctgttagttcagcgaacttgacttacctcaagacaggctggctacagacgtgcacccacttcaccagggcggtgctgattaagtgccacaaaacgtgggaaatgtgccaggcacggtggctcacgcctataatcccagcactttgggaggctgaggcggacggatcacctgaggtcagaagtttgagaccaacccggtcaccgtggtgaaaccccccgtctctactaaaaatacaaaacttagccaggtgtggtggtgctcgcctgtaattccagctacccaggaggctgaggcaggagaatcgcttgaacccaggagtcggaggttgcggtgagcagagatcgtgccattgcactccagcctggggtatagagcaagactctgtttcaaaaaaaaaaaaaaacagaaaaagtgtgaaactcttagctagcctagggatggagaagcagtaggtgattagtaattgcataggagggcgtcacggagggctgagccatggatggcggtggcgctggctccccaagctctgtcattgcccccagtgccctgttcacttagatgctcagtaaatgctccaggaaactgcagcacaaggaataatgaacttggagcggggaagagctggctttgtcccgggagagctcgggcaagaggcctcgcatgtctgtgcctcccttttcccctttgtgagacggggtatacccagtgcctcgtcactctgtggctgttgttatgattaggatcatttcctgctggaggcactgctgggggctccgtgagatggtgaatgacaagtggtggatacgtgggactgagattcctcccccgacactcaaaaccccatgggcggccgggcatagtggctcacacctgtaatctcagcactttgtgaggctgaggcaggcggatcacctgaggtcaggagtgcgagaccagcctggccaatatggtgaaaccccatctccactaaaaatacaaaaattagccgtgtgtggtggcgagcacctgtaatcccagctgcttgggaagctgaggcaggagaaccacttgaacccgggaggcggaggttgcagtgaagcgagatcgggccactgcactccatcctgggagataagagagaaactctgtctcaaaaacaaaaacaaacaaaccaaaaaaaccacgggagttttctggggtcgctgtgggtcaccccccagttgggcctggaggggatttggggacccggaagcaaaggattctgtgtgtcctgcctatctcccaggatcaggagctccagggaaaccctccctggagtcccttctttgtttgctccatgctgggtgatgccagggccccccaagaggtgtcagtcccaacctcagccacaagcaactcccagtcttgggagacagactgggacaggtaccccccaccctgtggagtcagggtgggctggaggaacaggagcagggagccggaaaggaggctggactccggacaggtgacaatcatgcaattgctgtcctctgtagggcaatgtgaaggctggggcgtggggacccgtccccccattagccagggtaacagagtggggaggggtcgttgacagagcggaggggtactccagggtggtgctcagtgaggcgagtgtagagttgagaagaaggaagttcccaggggtgggcaggaaacccatgtctgacctttgacctttgcagctacccggtggttcctgatcctgattccggacccttcccagcggcgtcgtcggcggctgctagtgggggaaggagggctgggggctgccacgggtgcccaaccagccatttctctgggttggccagacccacccagagccccccagagctgggcaggaggagaacatcctccgtaatgggggcaatgtagtctgagtgaacccagcattacagtttagagttctggagttgagttctgactgtgccacctaccagctttgtggccttggagaagtgactttccctccctgggcctcagttttctcctgtccgaagtggagatagccaggtgcagtggctcacacctgtaatcccagcagttagggaggcagaggtgggagaatcgttggagcccacaagttcaagaccctgttctaaaaaaaaaaaaacccaaaaaacaaaaacaaaacaaaaatcaagtgaagacaacatagccagttttttttgttttttttttttgttttttttttttttttttgagatggagtctggcactgttccccaggctggagtgcagtggcactatcttggctcaccacagcctctgcctcctgggttcaagggattctcctgcctcagcctcctgagtagctgggactacaggcacgcgccagcatgcctggctaattttttgtatttttagtagagacagggtttcaccaggctggtctcaaactcctgacctcgtgatccgcctgcgtcggcctcccaaagtgctcggattacaggcgtgagctacctcacctggccaacaacatagccagttttgaagtacttgacgtcatgcctggaacatactcagtcttaataaatgatggccttttttttttgagacagagtcttgctctattgctcaggatggagtgcagtggtgcgatctcggctcactgcaacctctgcctccagagttcaagcaattctcctgcctcagcctcccaagtagctgggattacagatgtgcagcactactgctcagctaatttttgtatttttagtagagacggggttccaccatgttgaccaggctggtcacaaactcctgacctcaggtgatccacctgccttggactcccaaagtgctgagattacagaatgaaccaccgcaccgggcaatgatggcattttttaagatgtgagggctggatcatgcctggcctctgatgtcaggctgaggaactcagacataggggaggggcagtattcccagctgccggtgccccaggcctgtgagagcactggggaaaggagagcatgatggggatgaagtgtgggtgaccagggtccagcagaggagctgaggctgggtgcagtgtctgggccaatgccagtagatgtgggtcttggtgtacacttaagatcttggctgttcttcattgtatatagaagatgttgcatctatgtatgtatgaatgtgataccagttgacaaggaaaaataaaggcaacctcaaactcccagaaaacaaaaagccccccggacctgatggtactgatgtgccacaattttgaacagttgtcaccatgtgagaagcagagttttaaatatacataccaatgttatttgtatcaagcccaaaaacaatatttggtgtccttttctaatttgatctcacacctttaatttgtaatgtttctgttttggatcatttgttatattagctgatttaactttgtaactttttgtttgtttgttttgaggcagagttttctcttgtcgtccaggctggcatgcaatggcatgatcttggctcactgcaacctccacctctgggttcaagtgattctcctgcctcagcctcctgagtagctgggattacaggtgcacaccaccatgcctagctaattttttttttttttttggtattttttagtacagatgggctttcgccatgttggccaggctggtgtcgaactcctgaccacaggtgatccacccacctcatcctcccaaattgctgggattacaggcgtgagccaccacgccaggcctgatttttttttttttttttttttttttttttttttttttttttttagcaaaaagggtaggctgggggtcgtggctcacacctgtaatcccagcactttgggaggtcgaggcgggtagatcacgaggtcaggagttcgagaccagcctggccaatatggtgaaaccccatctctactaaaaatacaaaaattagctagatatggtggcggatgccagtactcccagctacacgggaggctgaggcagaagaattgcttgaacctgggaggtggaggttgcagtgagcccagatcgtgccactgcactctagcctgggctacagagtgagactccatctcaaaaaaaaaaaaaaaaaaaaaggtaaagatagaccttcctctttttgcacagtattatgtctttgagattcattgactcctatggctggctgtttaggttttcaccagatacagtaccataaaattatgaatggacacttagattttttctgagttagtttttcaataaataaaagaagatttaaaatcaaatttcctggctgggtgcggtggctcacatctgtaatccaaagcactttggaaagccaaggcaggcggatcacttgagtccaggagtttgagaccagcctgggcaacatgttgaaatcccatctcttcaaaaaatacaaaaattagccgggtgtggtagtcccagctacttgggaggctgaggcagagaattgcttgaatccaggaggcacaggttgcagtgagccgagatcacaccactgcactccagcctgggtgacagagtgagacccggtctcaaaaaaaaaaaaaaaaaaaaaaagaaagaaagaaagaaagaaagaaagaaagaaaatcaaatttccagaaatgaatgaaattactgggtctcaaagtgggcacatttttacattttgatagttgtcaccaatttgtccttcaaagaggttgttttcattgacatctttgcctgcgatgtctgaaatctccaaacatggactttatgaaaatgttctgtttgtgtccttggccagaaaaatctggagggagaatgtgagtgcctgatcaagaatctacatgaagtcaaatgcatcagccctgatgtgagtgttgggttttttcctgaaaacaatttgtcatgttcacaggaaattttgcacatgaatcccttcaaattcccttggaggggcatcagaaaatcaggcttgctttttaaacccttttgtttttctaaacagaaaacaattgatttggtttcatttgtttgtttgagtggagaaggaaaaactgtcatgaggaagtcaactctgtgtcactccctgaaaactgacactgaagtcctcatggagacacgagttaaaaaaaaacaaaatcactcagaacttcaggaaggtccttgaggaagtgatatttctggtgaagaaggatttcagtgaagttcagaaaaccttccactattttgtttttttttttttgagacggagtgttgcgctgttgcccaggctggagtgcagtggcacgatcttggctcactgcaagctccgcctccttccgggttcatgccattctcctgcttcagcctctagagtagctggggactacaggctaattttttgtgcctttagtagagatggggtttcaccgtgttagccaggatggtctcgatctcctgacctcgtgatccacccacctcggcctcccaaagtgctaggattacaggcgtgagcccctgcgcctggcttttttttttctttttctttttttgttttttttgagacggagtctcgctctgtcgcccaggctggagtgcagtggcgccatttcggctcactgcaacctctgtctcccaggttagagcaattctggctcagcctcctaagtagatgggactacaggtacacactaccacccccggctaattgttatatttttaatagagactgggtttcaccatattggacagactggtcttgaactcctgacctcaagtgatcctcctaactcagcctcccaaaatgctgggattacaggcattagccactgcaccgggccaaccctccacttttatgtctgtgagtttggtttttggttaatcgaagtgaagttaagttttgtgcttttggaggtgacggaggcagcgaagagagtccctctgtggggtgggggaaacctgtgctctctgggactctgtgttccctgctgaaaaacagggacctaggctgggcgtggtggctcacgcctgtaatcccagcactttgggaggctgaggcaggcagatcacctgaggccaggagtttgagaccaccctgaccaacatggagaaaccccgtctctactaaaaatacaaaactagccaagtgtcctggcgcatgcctgtaatcccagcactggggaggctgaggcagaagaatcgcttaaacccgggaggtggaggttgcagtgagctgagactgcgccattgcactccagcctgggcaacaacagtgaaactcggtgtcataaataaataaataaataaaaagaaaaacagggacctacttccttgcctgtgactggagggctggaaaggtcaggttgcaactagcccatgtcccctcctgccaaggccactgtgggctttccatttttgtcccctacccctgtccctccagctatgggaggggaggtccagtgtggccacggatagggattacccaggatggtgccctggagacaggggtagacagacagagataaccagagacagaaagacacttaaagagatgaccagcagagggcgggtgctgttgctcacgcctgtaatcccagcactttgggaggccgatgcaggtgaatcacctgaggtcaggagttcgaaaccagcctggcccaacatggtgaaaccctgtctccactaaaaataaaaatattggccaggcgcagtggctcacacctgtaatcccagcacttggaggccgaggcgggcggatcatgaggtcaggagttcaagaccagcctggccaacatggcgaaaccccatctctactaaaaaaaatacaaaaattagctaggtgtggtggcacgtgcctgtaatcccttgggagtctacttgggaggctgaggcaggagaatcacttgaacccaggaggcggaggttgcagtgagccgagaccacgccactgcactccagcctggcgacagagcgagactccgtctcaaaaaaaaaaaaaaaaaaaattagcccagtgtagtggcacgtgcctgtaattccagctacttgggaaggtgaggcaggagaatcatttgaaccagggaggtggaggttgccgtgagccgagatcacgccactgcactccagcctggggaacagagcaagattccgtctcaaaaaaaaaaaaaaaaaaaaaaaaggctgggtgcggtggctcaggcccataatcccaacactttgggaggccaaggcaggtggatcacctgaggtcaggggttcaagaccagcctggccaacatggtgaaatcctgtctctactaaaaaaaaaaaaaaaaaaaaaaaaatttgctggctgtggttatgcgcacctgtaatcccagctactcaggaggctgaggcaggagaatcacttaaactgagggggcggaggttgcagtgagccaaaatcgcaccattgcactctagcctaggcaaaaagagcgaaactccatctcaaaaaaaaaagaaagaaagagagagatgatcaacagagaccaagagggatcattagacaggtggaggcagggagacagaacaaggacagctcagtggctggctctgtagggtgggaggcaggtctcactgagaagtgctgtttgcctctctgggcatccagggagcctcagtgcagaccaagttctcagcctaccctcctcaagtcacctcgaatactcaccgactcttgtcttatgacttccctggggttcaaagcctccagcctcaaattccccgcttcccaaaattctttgacactagttctgcctgtgcccctcctacttacacatctgccatggctccctatcaccctccatccccagaactgattttttttttttttggagacggagtctcgctctgtcgctcaggctggagtgcagtggcgcgatctcggctcactgcaacctctgcttcccgggttcaagcaattctcctgcctcagcctccggaatagctgggtttacagatgcccatgaccacacccagctatttttttgtatttttagtagagatggggtttcaccatgttggccgggctggtctcgaactcctgatcccaagtgatcagtgcgccttggcctcccaaagtgttgggattacaggagtgagccaccacggctggctcagaactgatgttcagtggtccctcgggtatggtcaagatggagccagcagtggaaataaatgcataatggtgacaatgacttagttcccatggacagccctgtgccctgccctttacacgggccagttcttggaccacacagcgccgtggtgagggggtcttgcgtccctggggtcctggctggggcgaggccagtctccaggcttccagctctggctgactccagaaggaggaaccgtttcctgctggcttctggattgacgccagggccgggggaggtggtctcagacccaccctgtccgactctcaaactctgggccctcaggaggctgcaactggatctgctggctggggcggcccctggtggccgttggcggaacacaacagctagatctccccttcccgcagcctcattttccccataggcagagcctccagatgagccccctctcaggtgaaggtcctgatcaggcacctacaaaccccaggtggatgggaggatcgtgagcaggactggctaaagggggtggtgtcagagttccaagagcttccaatcccctctctacaccggcctcttaggaattttttaaatttatttttatgtacttagtttttgagtaacaggtctcactctgtcacccagactggagtgcagtggctacgatctcagctcactgcaacctccacctccagggttcaagcgattctcctggcacagcctcccgtgtagctgggactacaggtgtgcaccaccacgcccggctaattgttatttgtatttacttatttatttttttgaaatggagtctcgctctgttgcccaggctggagtgcagtggtgcaatctgggctcactacaacctctgcctcccagattcaagcgattctcctgcctcagcctcccaagtagctgggattacagacgcccaccacctcgccctgctaatttttgtatttttagtagagatggggtttcaccatgttggccaggctggtcttgaactcttgacctcagatgatccacctgcctcggactcccaaagtgctgggattacaggtgtgagccaccgtgcccagcctattcatttagtttttgagacagggtctcactctgtcgcccaggctggagtgcaatggagtgatcttggcttactgcaacctctacccccagggttcaagcgattctcctgcctcagcctcccaagtagctgggactacaggtgcgcaccaccacgcctggctaatttttaaactttttgtaaagatggtggtctccttacattgctcaggctgttctccaactcctgggctcaagtgatcctcctgcttcagcctcccaatgtgctgggattatagacacgagccaccaccacactcagcccagacatttttaaaaacaatttttaatttttaatttgtaataagtgacacatgtgcatggtttttaaaaatgcaatttttacaaaaggtacatagagaaatgtgcaagtatgtcccccaccgattcccagacccctggttcgctccccagaggtggaggctgtgaccagcatctccttcagagatatttggataaaagtcccctccccaagccctacacacacacacacacacaaaaacgggggccgggcacagcggctcaggcctgtaatcccagcactttgggaggccaaggagggtggatcacccgaggttagcaattcgagaccagcctggccaacatggtgaaaccccgtctttactaaaaaacacaaaaaactagctgagtctggtgatgggcgcctgtaattccagttactcgaggctgaggcaagagaatcgtttgaacccgagaggcggaggttgcagtgagctgagactgcgccattgcactccagcctgggcaacaaaagcaagactctatctcaaaaagaaaaaaaaagaaagaaagaaagaaagtacacaacttatcaatctcctgcttttcacattaacatatcttagagaagatctgctttggctgtttaaatggtggttgcatagcgttccactgtggatggacagacactttttctttttctgtctttcttttctatttatttttattttttttgagacagagtctcactctgtcacccaggctggagtgcagtggtgcgatctcagatcactgcaagctccgcctcccaggttcatgccattctcccgcctcagcctcccaagtagctgggactacagatgcccaccaccatgcccggctaattttttgtatttttaatagagaaagggtttcaccgtgttagccaggatggtctcgatctcctgacctcgtgatccgcccgcctcggcctcccaaagtgctgggattacaggcgtgagccacccccgggctctttttttccttttttttttttttttttttttttgagacaggatctcactcagtcacctaggctggagtgcagtggcatgatcatggctcactgcagcttccacctcctgggcttaagtgatcttcctgcttcagcctcccaagtagctgggaccacaggtgcatgccaccaagcctggctactttcttctctttctttcttttcttttttgtctttcttttttctttctttctcttctttcttttcttgaaggggttttgctccagtcaccctagcacgatcttggctcactgcagcctctgcctcccaggctcaagtgatcctcccacctcagtctccgaagtagatgggaccacaggtgcatgccaccatgcccagctaatattttgtatttttggtagagaatgggtttcaccatgttgcccaggctggtctcaaacacctgagctcaagtgatccacccgcctcagcctcccaaagaattttgaaacaattatttgtagagacagggtctccctatgttgcccagactggtcttgaacttcagggctcaagagatcctcccgccttagcctcccaaagtattgggcttacaggcatgaaccactgtgcccagcatgattttcttaataatttttttatagctttaatttttcatgtttaatttttgagaccgggtcttgctctgtcactcagaggactgaagtgcagtggtgtgatcatggctcactgcaaacttgacgtcctgggctcaagtgatcctcccgcctcagcctcccaagtagctggggctacagatgcatgtcaccatgctcagctaattattgatattatttgtagagacaggttcttgctatggtgcccaggctggtcttgaactcctgggctcaagtgatcttcttgctgtggcctcccaaaatgttgggattacaggcgtgagccaccacacctggccagctttgagtttggaggagtcaaagttatgtgtgaattttcaactgcatggagaactggtgcccataacctttgtgttgttaaggagttggagattaatccaccaaattttctgtaagtctgaagttatgccaaatataaaggttaaatttagataacaagctaaaaatgtttaaaggttagaaaaacaagaaaacccactaatacattcatgtgaaattgagcaatataaaattgtccatatttcaatgatttttgacccatataaacagctctttcttgtgattcaacctacagattctcttccttttagttgtagcttttatttttcttgtgtaattgcattggcttgtactcccagaaaaaaaactacttgacagtggacgtcctcaccttggcactgattttgatgtgttttttcccccacaatttatacatttcctcatttgatctattagtatagcaattaacagacttggcaatattgaaccattgctctgtctcaggcataagtcacctttgttgcagtgtaggttaaaaacatgggctgggagcggtggctcacacctgtaatcccagcactttgggaggccgggtgggcggatcacctaagctcaggagttcgagaccagcctggccaacatggtgtaaccccgtctctactaaaaatacaaaaatcagctgggcgtagtggtgggggcctgtaatcccagctacctgggaggctgaggcaggagaattgcttgaacctgggaggtgaaggttgcagtgagcccaaattgtgccactgcactccagcctgggcgacaacagcaaaactccatctcaaaaccaaaccaaaacaaacatgttacttggttctttttgtttaaattccatctgggagttttgtacccttctcacagggttagggatttgcggttttcctattgtgccacctttgtcagcttttgttgtcaaatcagctccctatcatgagtccaatcacccattttacagatagggtaaactgaaacccaaagagggaaagtgaccctttccggtttttcctgagccagggctagacctccagtcctcatatctgtgggatgacggcaacattgttgttagaggggacttcaaatcccagctaagcactagctcactgcatgatcacttgggcctcagtttccctgtctgtagaataagcactttacatggtgggggagagagggctgaggcacctttctgtgcagtttccgttcaggacgtctccagggtctaaagctgagtgtcgcatccagcgtgggggtgcctctatacacgtccccgcagaccccccccccatatgtgtcctccaggccgacgcccccttccggcagggggccgactcaccctcgtgcgcgccgcgccggccgccggcagcccccggagggtccggagcgagagcgcgagcgagggctgggccggggtcgggaccccgagcggggacgcggccggggcactctgcgctgtgggctcatctcggcttccaggacgttactgccgggaagggggaagggggctgtcagcctctggacccctgtccccagacatcgccagccctcatccgccagagcgtccctttgctgggaactccatccccagagatccccatctcccagggtttcccgctccccaggatccggcatccgttctcgacccccagccattcccgggacgcctccctagagactcccagctacatccccagaagctctgtccccctaccaccagcctctccctcgatactcccttttccttgctcccttctcttccgttccccgtccctctcggggctcccaccgacgctggatcctggggacctaagtttctagaatgcccgccccagcctggaatcccaagagagtccactcccttctccatccttaggttccaattccaggatccccctattaaatcaacaatgccccccccccaccacaattccacgcccaaagtaatgattggccgaaagaatgcagccctgcgcaagcattggtcgcgccctccccgtccatccgaccccgccctcgggccagcccctcactcacaggcgttcgcgcagcgccgcctcccgggccgcacaggcttcgccctcggcctccgccacgcctgcgcgccgcagagcctcgtccagccgccgcgtagactccgtggccgccgcctcccagcgcgccagggcctctgggggcgcagggagccgggtcaggctggagactcccgcgcccacccgccccacgcacgccggaatccaagttgatagtctgcatgccgtttgcacgctttcctttatttgaattaaattagtgtgtaccattgcatggcttccacgtgccatttgcatagcttttcataggtttgcattgctttcgtgagtcgtttacaaggagtttgcatgttttgtggcatttgccttgtttttgtgacatttgcatggcctctgcatgttgtttgcattcttttcataagtttttgcgtttatatccgtgttatttgcattacgtttgcaactgtgcttgtttggataactaggattcacctaggctcctcccacttctatccctgcccactcccttacaccccaacgcacctgtcagcgccccgttctcggcccccatctgggtcccctgtgccttggcttcgtccatctcaatcttcagtgtcgttagttgggtctgaagccggctctgaggagtggaggggaagtgggagggggtgtaggcagaggagaggaggagtgattcggcctggcccttttggggacagtgagaagccacctgcgaccctgtgtcctgagctttgtgtggaatgtcctttggggccttgtagttgtaaaatacagaagtggcttctgaagcctggggcaccgagtggtgacagctgcctgcctggagggagatctctgcccaggtccaacgccaccaaccctaagccaccagaaagtggagagtgctgagctctgcggtcagattcaagttccactttcagctccatctgggactagctgatgggatttcaaaccaacaaagttagccgggcgtcgtggctcacgcctgtaatctcagcactttgggagaccgaggcaggcggatcacttgaggccaggagttcgagactagcctggccaacatggtgaaaacccatctctacttaaaaaaaaaaaaaaaatagcagtgtgtggtggtgggcgcctgtaatcccagctcctcaggaggctgagacaggagaatcgcttgaacctgggaggtggaggttgcagtgagctattgtgccactgcactccagcctggacaaaagagcatgactccgtctcagaacaaacaaacccagcaacaacaaaaaccaacacagggcaatttgatggttgacaatgattgaatttttggggtatgtgtcggttgcctgtgtaggacattctgcaaaacgactggttcggcttcctcagtgcgtcttacagcaagggggcagagccagaacctgtacttggagtaggatcctcttaacctcgactgccccagtcccttctcttggtccagggggcagaaaaggggtaggggtttatttggatttatttatttattttgagatggggtcttgctctgtcgcccaggcgggagtgcagtggtgggatctcagctcactgcaacctccgcctgggattacaagcatgcgccatcacacctggctaatttttgtatttttagtagagacgggttttcaccacattggccaggctggtctcgaactcttgacctcaactgatacactcgccctggcttccaaaagtgctaggattacaggcgtgagccactgcgcccggccccattttgatttttaatattcagatgctgcactacctcggctgggctgggaggttggggtggaatggggggtgtgcacagaggtatacagtagtcactccataaatggaaatggctgggattttaaggacagttcttttggcaggctcagggctggaaaaggttaagaaaaagtctgaagggttagtcagaggaaaaggaggacccagcaggtacctcccccaagaggccaactttagcctcctaattacaggtgacatgtatgtccctctctcaaaatagggctgctggaaactggctggagtggggctgagttggcacatggaggagggcctccagtggtctggcgtttctccagacaccatttatctggcaaatagcaaaggacagtgagacttttttttttttttttttttttttttttttcagatggagtctcgctgtgtcacccaggctggagtgcagtggcgcggtctcagctcactgcaacctccaccttccgggttcaagcgattctcccgcgttagcctcctgaggagctgggattacaggcgttcaccatcacgccaggctaatttttgtatttttagtagagacagggtttcaccatattggccaggctggtctcgaactcctgacctcaggtgatccacctttctgatcagaaggtagactccatggtgagctgacatctaagggttggaaggcattagggcgctattctcaataccctctcaattcgaggaactggggaaaccgaggcacagggagggaaccctggagttgtgtgggcaggccgtctcttatctcaacattctggattcccgagctccccctctacccggcccacctacctggcggccttcacaggcctttaatgccttctccaactcgtgccggatactttccgcctggtccagctgcctggctagggcctcctcccgctcggcagcctctgccagccggcgccgcaggtcgtcgaccccaggcggcgggtccccgggcggcgccgtggcattggcccctggctccgggcagcgaggtccccgagcagccgaggcggccagattccaggctaccagggccccgccggctgctgccgcagccaggaacacggccaccccgcacagggcgagcacccgccaggcacgcccgggctccggccccggctcggccatgccgcggtccacagctctggccccagacggccacgaatatttaattggcaccttggggcgccagggacacccacggttccgcccagcctggccgtggcttcccaggccgttgggaggggttggaccccctccaggggctggtccatcccgtcgagcccaagaaaggactaggggttctgggttcctgcatcccacgtgctgccctctgtgcctcaatttccccctttgtgaaatggggagagtattaactcctgcttggtagggcttggtaggaatcaagctggcacatctgtaggaagcgccaaagaccgcatctgcaaacgaagtgcttggctatcatttggggatatgtcgtttccaatattttttaatcttaattttgtgtgtttgtgtcgcccaagctggagtgcaatggcacaatcttggctcactgaaacctccgtctctggttgaagcgattctcctgcctcagcctcctgagtagctgggattacaggcgactgccatcacgcccagctaatttttatatttttagtagacacggggtttcaccatgttggccaggctggtctcgaactcctgacctcaaatgatctgcccacctcggcttcccaaagtgctgagattacaggcgtgagcccccgcgcccggctaattttaattttttttgtttgattgtttttttgagacagggtctcgctatgttgcccaggctggtcttgaactcctgggctcaagcgatcctcccgccttggtctcccaaagtgctgggattaaaggcgtgagccaccgcatccggcctgtggttcccattctgttgacggggtaaccgcattgggagatgggaggatactccactgacttacggttggcagagtttaggctgccacgccggctgtgaagaggaccggagggtagacaacagggtggaccggccccgtcttcccgcctgctcgccactgggcagccagagggcgatcttacaacgtgattacaattgggctctggctccccttccctcttagaatacaacccgttctcccctccccttccttcctcctactctccctcctccccctcctccctcctcttcctgtttctccttctctatctccccctgccccttctctccctccttacaccttcaaggacctgatcacacctttaaggtcattttcttttcactccttcctgtagcctccccaaggttcttccaccaagtgcattcccatcgcagggcctttacaccttctcctcctctgcctggctaattgctgctctgctaacaggtcccctcctacagaaagtccccctcttcaacactacctccttttgatcagctcctagggccctaacattaaaaaggtaatggcaggccgggcgcaatgggtcacgtctgtaatcccagcactttgggatgccgaggcgggtggatcacctgaagtcaggagttcgagaccagcctggccaacatgatgaaacctcatctcttttaaaaacacaaaaattagtcgggtgtggtggcgggcgcctgtaatcccagctacctgggaggctgaggcaggagaatgggttcaacccaggagggggaggttgcagtgagctgaaatcatgccattgcactccagcctgggcgacaagagcaagactctgtcttaaaaaaaaaaaaaattagccaggtgtggtggctggcgcctttaatcccagctactcaggagggtgaggcaggataatctcttgaactcgggaggtggaggttgcagtgagcagagatcgtgccactgcactccagcctgggtgacagagtgagactctgtctcaaaaaaaaaaaaaagtaattatatatttatgcgtgtgactgattctcccccccacccccgcctttcccatcaaactgggtgatcttccccttcaccctctgaaggttccttgaaaaatcaactcacaaaaggaagattaataggagaaatgaggcagaggtgggaggatcactttagcccgggagtttcagaccagcctgggtaacacggtgagaccccatcgctacaaaaaaaaaaaaaaaaaatgagcctgatgtggtggtgtgcacctgtagtcctagctactcaggaggctgaggcagaagtatcgcctgagtccaggaaatggaggctgcagtgagccgagatcgcaccactgcactccagcctgggcaacagagtgagaccatgtctcaaaaaacaaaaaaaagtctattcaggtatgttgatagactttagtctttctgcctgtgatatgagttcagttaatgaaaactcaaagaatcagaagtaattgttttcttttttggtgggtccagaatttaggcgtgtaaaaaataaaataaaattttaggaccttccagatttattatgtcaaggggtaatagttaagccctggaaactgaatcaacctttctttcttttcttgtattcattcattcattctttctttctttctttcttttttttttttttttttgagatggagtcttgctctgtcgcccaggctggaatgcaatgttggctcactgcaacctctgcctcctgggttcaagcaattctcctgcctcagcctcctgagtagctgggattgcaggcacctgccaccactcctagctaattttttttttttttgagatggcgtcttgctctgttgccaaggctggagtgcaatgtcacgatctcagcccactgcaacctctgccttccaggttcaagagattctcctgcctcagcctcccaagtagctgggattacaggcacctgccaacacacctagctaacttttatatttttagtagagatgggatttcactatgttggccaggctgtctcgaactcatggccccaagtgatctgcccacctcggcctcccaaagtgctgggattacaggggtgagccaccacgcctggcctctttattttttcttttcttttttttttgagaccaggtctcactctgtcacccaggctggagtacagtggtgccatcacggctcactgcagccttgacctcctgggctcaagcgatgcccccacctgggcctccagcgatgccccaacttgggcctccctgaatgctgggattaccaccactgtgagcaccgagccaccccattcccaacccctggcctttcttgtgtggagatatcccacattaactagacttcctagtcttcattcaagcatagactaaatgttgttggagatagagacccttgtgactgtcacctctttacaacagaatgtgtaagcaacccccttaggacatagtcaatagtagccaatctaatctcctatctgtattctagcctttgcatgggaaatgtatttctgttcagcacctctgtttgtggctttataaaggatccaggccaggcgagctggctcatgcctgtaatcccagcactttgggaggccgaggcgggcgaatcacgaggccaggagttcgaggccagcctgacccacatgtcgaaaccctgtctctaccaaaaatacaaaaattagccgggcgtgatggcgggcacctgtaatcccagctactcgggagactgagacggagaatcgcttgaacccgggaggcagaggttgcagcgagtcgagatcatgccattgcactccagcctgggtgacaagagcaagactccatctcaaacaaacaaacaaacaaacaatccacacttttccctgaatgagaggcactcatcctcattctttggtgtccctgtggccctggatagactctgccctcacactttgccctggaaaaaactcttttaaccaggcttggcatggtggctcacatctgtaacccaagcactttgggagactgaggtgggaggatcacttgagcccaggagtttgagatcagcctgggcaaaatggtgagaccccatctctacaaaatataaaaaaaattagggccgggcatggtggctcatgcctgtaatcccagaactttgggaggccgaggcaggtggatcacctgaggtcaggagtttgtgaccagcctggccaacgggtgaaaccccatcttaactaaaaatacaaaaattggccagcgcaatggctcatgcctgtaatcccagcactttgggaggccaaggagggtggatcacgacatcaagagtttgagaccagcctggcaaacatggtgaaaccccatctctactaaaaatacaaaaattagctgtgtgtggtggcgggtatctgtagtcccagctactcgggaggctgagctgagatcgtgccactgcacaccagcctgggcgacaaagcgagactctgtctcaaaaagaaaaaaaaaatttagccaggcatggtggtgggtatctgtaatcccagctactcgggaggctgaggcaagagaattgcttgaacccaagaaggggaggttgcagtgagccgagatcatgccattgcactctaacctgggtgacaagagtgaaactctgtctaaaaaaaaaaaaaaagaaaaagaaatgagctgtgtctggacgtgtggacgtggctcactcacgcttgtaatcctggcactttgggaggccaaggcaggaggattacttaaggccaagcattcaagatcaacctggccaacatagtgagatcctgtctttattatttaaaaaaaaaaaaaatttgctgggcatggtggtgcatacctgtggtcccagctactcaagaggctgaggtgtgaggattgctggagcccaggggattgaggctgcagtgatccaaggtcgcaccactgcacttaagcctgggtgacagagagaggccctgtctcaaaaaaaaaaaaagaaagaaatcagagctcagagaggtcgagtcccagagcagggacactcagcagtggctggtcactgccaaattcccactggggactgcagaaccccacagccgtcagcttctcaacccctgggtgggtcacagccttggagtcaggtctctcaggaaaaggacaaaatagggagggaagatgggacattttaggaagtagggaaatttacacccaggccattgtgtggggggattgggagttgaatccacaatattgggctaatcttatcagcaaaatacagcccaggcaggatgggggtgggggttgtggggggagagtgggggagggagtgtgagtaggggtgggggtgggtggagcagcagcatagtctggggacctttccatggcccaagtcgggagtggtgagtggaggaggtcacgtggggagcgtttgtttcctgggcaaaaggaaatccacagaatgtggagggttaattgcccaacgagctttgaaaccctgaacaaggccaggcatggtggctcacgcctgtaatcccagcactttgggaggctgaggcgggcggatcacgaggtcaggagatcaagaccatcctggctaacacggtgacaccccgtctctactaaaaatacaaaaaaaattagcccagcgtggtggtgggcgcctgtagtcccagctacttgggaggctgaggcaggagaatcacttgaatccaggaggtggaggttgcaatgagctgagatcgcaccattgcactccagcctgggcaacagagcaagactccatctcaaaaaacaaacaaaccaaccacaaaaaaaacaaaaacccctgaaaaagtccagtaattaccctaggcctcaccggggctgttggtgaggatgaaatagcttagtagttgcaaagcggctttggcttttttgcaagccagggccacagaagtgaaggcccaccctgctcccggggacacttagcaacatatagagactttttttttcttttgagacagagtctggctctgttgcccaggctggagttgcatcatcttggctcactgcagccttgacatcccaggctcaagcgatcctcctgcctcagcctcccaagtagctgcgactacaggcgtgtgccaccatgcccagctaattattaaattttttgtagagatggaggtctccctatgttgcccaggctggtcttgacctcctgggctgaagcaatcctcccccttcgacctcccaaagtgctgggattacaggcatgagccaccatgcccagcctggaaacatttttaattgtcacaacttgggagggtgttacttgcatttatgggtgggggccagggatgccgtttaatatcctacaatgcagctgggcgccgtgtctcatgtctgtaattccagcactttgggaggccgaggcgggtggatttcttcaggtcaggagttcaagaccagcctgaacaacatggtgaaacaccgtttctactaaaaatacaaaaattagccggacatgatggcgggtgcctgtaatcccagctactcgggaggctgaggcaggataatcacttgaacccgggagacggagtttgcagtgagctgaaatcgcaccactgcactccagcctgggagacagagtgagactccatctcaaaaaaacaaacaaaaaaaacccaaaacaaaaaacaaaatcctacaatgcacaggatggtccccacccagagaaccatccagcccaaaccaccaatgctgctgaggctgagaccctgccctagaccttgggagtgaggaacgggtgctccaggcagcaggcagagcttgggcaaaggccttgaggcaaaaaggaacttgggatcagtaaaggtggaggtggtgagcaaggggaagtgagggggcaagagggccagggggtctgtggcaggggaggtatttggggacccttccctgggacagcagtaggaaccatggaagtggaggcctggttttatttatttatttatttttgagacagactcttgctctgtcgcccaggctagagtgcagtagcgtgatctcagctcactgcaacctccacctcctgggttcaagcgattttcctgcctcagcctcctgtgtagctgggactataggcacgacccaccaccccccgctaattttttttattttgagacagagtctcgctctattgcccaggcaggagtgcagtggcgggatctcggctcactgcaacatccgcctctcgggttcaagcgattctcgtgcctcagcctcctgagtaactgggactacaggtgcatgccaccacgccaggctaattttttgtatttttagtagagacagggtttcaccgtgttcgccaggatggtctggatctcttgaccttgtgatccaacaaccttggcctcccaaagtgctgggattacaggcatgaaccaccacgcccagccatttttttgtatttttagtagagatggggttcaccatgttggccaggttggtcttgaactgagctcaagtgatccacctgcctcggcctcccaaagttctgggattacaggcgtgagccactgtgcctggccagagggttttttttttttttaaatcccactgaccgtctgggctggggactgtgggaccttaggatagtacagaaatctgggacaagggactcctggctccattaccacaaacaggagttggagttgcagagacaatggccgggattccgggagaacttggaggaagtaagataacagagaaggaagggactatggcatctttgaggatcgaataaggtaggtgaagggtccgtcgggattgcagccctcaattgtggagaagcagagagactctctgggggaggggttcccagagctgggtactgcagaatgaataagagtttggggaatcgggccaggtgtgatggctcatgcctgtaatcccagcactttaggagcccaaggtgggtagatcccttgaggtcaggagtttgaggccagcctggccaacatgatgaaacccctgtctccactaaaaatacaaaaattagccaggtgtggtggtgtagtactgtaatcccagctactcgggaggctgaggcaggagaatcacttgaacctggaaggcagaagttgcagtgagccaagatcgtgccactctactccagcctgggcgacagagcaaaactctgtctcaaaaaaaaaaaaaaaaaagagccgggggtggtggctcatgcctgtaatcccagcactttgggaggccaaggcaggcagatcacctggggtcgagagttcgagactagcctgaccaacatggagaaaccccgtctttactaaaaatacaaaattagccgggcatggtggcgcaagcctgtagtcccagctacttgggaggctgaggcaggagaatcgcttgaacccgggaggcggaggttgcggtgagccgagactgcgccatcgcactccagcctgggaaacaagagcgaaactccgtctcaaaaaaaaaaaaaaaaaaaaaaaaaagagagagagagagagaatctgggggatgaagcagggggaaacattctgacaatgcatggcctgtgtgtgtgtacagatcccagtttaaatcccagcccagcattttctgcaggcgggaagggaagcaagacaaggttactctcagttacagcctcagtttcctcactggatccccaggaatcaggagaggctctagggaggagatgagaatacaacacctgggaaacggtgagccctgatgagggtgcatagttcttatgttgatcccagcagagacaagggctgggaagaactggggtggtgcctccccgaactccgtgggctcctgaaaacgtcctggagcagggaagggaggtgtcatcgtcaacggggtgtccactctcacctgcaggggcggccccaacgcttgggtactaaaacgatgatactccaggaactcgagagtcaggtgtgctctccctcaaaggaagtgtttattttttggagctcaaagaccccagaaaaaagcaaccccccccgcaaaaaaaacccataacaacaggcagcacatgccccccacaccgcaccccatgcccaatctcagggtgggagacaagaggggggactcattgtccggagggaggctctggagggagacagccctgggtcaacccgactgtgtccccacacccaggacttccccatggcccctccagacctgctccagaggcccttctccggctaccccgtgctctccccgctaaccgtgttgccccatgacccgctcagaactgatgagatcaagggaatgttcaagcgaaaagccgagcaggacggaccttccaagatgtgcctaaaggaccagaagagggactcagggcagactggaggcagcagacactggccccgctccaagcccggccccaagccccgcccccatcgctagacccgccccacccatccataagcccctcccctccatcgatagacccgcccccattgatagccccgccccatacagctatcagcccgtccccgatccagggcatccttctcactggattctccctccttccccaaggcccctcacctctgcgcccagtcccttcccctgcagcctctctctctagacttcggagcctctgcttccccgccccgcttccccagctttcttctccctcccggggccgccccctcctcactgaccagcttcctgggatctcactgcagcagagcgctgaggcccagcagcacaatcagcagctggggcgccgcagcggagctggagtcctgggagctggggtagtacttcttgtccgcgattctcacgcttaagacctggttttctcttctgcggtacagatggcaaatcaggcatctgctcgtcctggctcctgccgccctccctgtaagcccaccgcccccgggagttccccccgcaccgccccaatccaagtcaccggggagggaatggacagcggccacccatggctctgtgaccctaggggctaagttatccttttgtgggactcaaactttatcccttggggcaatggggattttgggagcaaaggagatcctgggtcttgggctagggatgtgggggtgagaggaatgtggcaggtggagggtagcgggggaaggctatctctgacctcagtcgctccacctctgcagacgcgtcctgaagcttatggtttaatgtagtgatctctcctggtagggtgggaggacagaaacagggggcgggtcagcatgtggccatgctggggccctgctccactctgggacagaacctcccccttaccccaacctccagccctggtctccctgcccccaccccctcttccatacctgactcacccctccccggccctctcccttctccctttctcaccctcaagctcctccactttcttttgtccttgggccttctctgcatccagggaagccattagggccatctaagaagagttagaatctggggttttggcctggggagtttggctgctgcccctgggacctgggcctcctccctaggtcctggggacagaggggcttaaatgcaaacccctttcaggttttcttccaaccctctctgcaccatggtctccaaccttaaagaacagccacaaccacacactctcccagggccacccataagcatgtgggtcctcaaaatgggagttttgaggccaccccacgtggaaacttggaggctatcgataaccaaagtttagtggacatttccagattgcctgagcaatggcccaagaaaagttagagggccctaccaaatccagaatgcagtgggatttccccgcccaagtgacatgcccagcgagagtttcaagatcccccatatcaggacccaggtgaatatttcagtttcttagggatgaagtgaaaatttcaaaagccccctttttcagggtctggtgaggtcccccttcaaccctgaatagggatttctactcccccaggactggtgcccacgaggagtttcaaggcccccgacaccagtgccctggaaagaatttataaattcacctaagtcccagggggatactgaggtccccgatttgggggatctggagagttttaacaccctgcccctacaccagtgccctggactgggttaggggcccacaaaccctggtaggggaacctaggtcccttgatgtgggggcccaggagcagtttcaggacctcccctgcatctccctggagacccaccctgggtcagatttctggggagagattcttgtccctcccaccgcctagtactaggccatccaaaggagttgaggagcttaccacagtgtggttgcaggtggcggcctgggcctccacatcctgaaagcccttctgggcctcggtcagctcttgttgcaggagatgggtgacattgcgacactccatcactgcccgaaggccgtcccggcaggcctcgctgttggccttgatggtgaagataatcaagggcacccccagaatcacgatgatcaggagcaccagaattcctatccccagcagaagcttacagcgcttatccccgtcttccatgggcactctgcaatagtcatacgaagtagatgccatccagatctcccctttagagtctggcctggagttaggggagggtgctggaatcttctacgggccacccctttattagcataggaaacgtcctgaccaatagcaagttccaggaagtgctctgaccagcagctcttgcatgaggcacctacaggcagaggattaattaggttttcagtttcagtttcccagaaaggaggtgggcttttttttcaccctgctttaaaagcccttgggcccttcccagctgggtgccagccaactgtggctgcctgggacactccatcttaagtccctgtgcctctgctgtgtgttactgagtgcctaggccgtgccagcctgtattcatctgtactatgacctgaagaggcagaggccatcactgttggtccggtctccacctggggaaactgaggttgcacagttgcgtggtggagtgagggcagggcctgggtctgggggcggggcctgggtctgaccccagggactggtttttgtgttcaggtgtctctgtggtgacgagcagggcttcatccagtgcctctgtccccaccgaggggactatgggagacatggagggtgtgtgagcaacaggtgagactggagccagctgaaaactgggagaccgacccagccaacaaacaatgtcggtctctgtcttggcacctgcaggaaacaagctcctacttccagaaaaagtgctcctgggactccaggataccaggtaaactctctgagcctgtttcttcatctgcaaaggggaataacagggccagcctcagacactgtccatgtggccaagagagccagggcttcctacaggaaatcaggcccattatcggcacccaactgctgggcatgaccgctgaaaggggactgcatgtttttcttgtggcttcttcagccacatcctgaccacagcccagattctgttaggtctgccatttccatgtttttttttcttttcagcagggccagacagtaggcgaggtcaagtccagagcccaggcctcccagaaggcctggggaactccccccaggccctgactccaacatccctcagaaggaccccattaaagccacttagagccaggcatggtggtacatgcctgtggtcccaggctgaggctgggaggctgaggcaggaggatcactcgagcccaggagtttgaggctgcagcgagctatgattgtgccacggcactcaagcctgggtgatagagtgggatcccatctcttaaaccaataaacaaaaaaatcacttagaaccaagaaccaattaacaagctgtgggagatgatcttgctgaaaattctgagggtgaacttgtcccaggaggagggacctaccagcctggccaggactccaggtgcaaagacacgacctttgcctgacttatttgactaagctgacttatttgagcagcactgttctggcctgctaactttagggttagtttgggaccaggtcggaaatcacaattgcatgaattgcacattggaggccagggtggtgcacctctgggcaaatgaatttcctctcttagcattgatttccccagctgtaaaatgtggataataatagattgatgtcctctctaaattttgcagctgtaaacagtcccagccctgcaaaccgaaagtttgttgctcttccctttaaaattactgtagggaccagccccacagggtcagtgggtctctccctgtgtgcggcgacgagagagtgtagaaataaagacacaagacgaagagataaaagaaaagacagctgggcccgggggaccactaccagcaatgcgcggagactggtagtggccccgaatgtctggctgtgctgttatttattggatacaaagcaaaaggggcagggtaaagagtgtgagtcatctccaatgataggtaaggtcacgtgggtcacgtgtccactggacagggggcccttccctgcctggcagccgaggcagagagagagagaggggacagacagaaagacagcttatgccattatttctgcatatcagagacttttagtactttcactaaatgactactgctatctagaaggcagagccaggtgtacaggatggaacatgaaggcggactaggagcgtgaccactgaagcacagcatcacagggagacggttaggctgccagataaccgcgggcgagcctgactgatgtcaggccctccacaagaggtggaggagcagagtcttctccaaactcccccagggaaaaggagcctccctttcccggtctgctaagtagtgggtgttgttccttgacacttttcgctaccgctagaccactgtccgctcgggcaacgggcgtcttcccagacgctggcgtcaccgctagaccaaggagcccttctgctggccctgtccgggcataacagaaggcttgcactcttgtcttctggtcacacctcactatgtcccctcagctcctatctctgtatggcctggtttttcctaggttatgattgtagaccgaggattattatactattgggataaagagtaattactacaaactaatgattaatgatattcatatatctctaagatctatatttggtataactattcttgttttatattttattatactggaacagctcgtgtcctcagtctcttgccttggcacctgggtggcttgccgcccacaattacaaatggtgggatgggtgcagtggctcatgcctgcaatcctagtactttgggaggctgagatgggaagattgcttgaggccagtagttcgagaccagcctggtcaacatagagagatcctatccctatttaaaaataaatatatatatatattttaagtacatatatttattttattttgttttaattaattaattaattaattaattttttttgagatggagtctcgctcttgttgcccaggctggagtgcagtggcacgatcttggctcactgcaacctctgcctccggagttcaagcgattcccctgcctcagcctcctgagtagctgggattacaggcgcccaccgccatgcctggcttatttttgtacttttagtagagacagggttttgccatgttgaccaggctggtcttgaactcctgacctcaggtgatctgtctgactcagcctcccaaagtgctgggattacaggcgtgagccactgcacctggcctatattttattttatatttttaaatatataatgtatttttatatattggttggtgcaaaagtaattgcggtttctgccattacttttttttttttttttttgagagggaatctctctctgtcgcccaggctggagtgcagtggtacgatctcgatcactacaacctctgcctcctgggttgaagcgattctcctgcctcagcctcctgagtagctgggactacagatgcctgccaccatgcctggctactttttgcatttttagtagagatggggtttcgccatgttggccaggctggtctcaaacttctgacctcaggtgatccacccaacttggactcaccaagtactgggattacaagcgtgagccaccgtgcccggcctatattttattttatatttttaaatatattctccctctgtcacccaggctggagtgcagtggtgtaatctcggctcactgcaacctctgcctcctgggttgaagtgattcttctgcctcagcctcctgagtagctgggactacagatgcctgccaccatgcccagctactttttgtatttttaggagagacggggtttcgacatgttggccaggctggtctcgaactcccgacctcaagggatccacccgacttggcctcccaaagtgctgggattacaggcatgagccaccgctcccagcctctgccattacttttttttttttttttttttttttgagatggaatttcactcttgttacccagggtggagtgcaatgatgcaatcttagctcaccacaacctctgcctcctgggttcaaacaattctcctgcctcagcctccctagtagctgggattacaggcatgcgccaccatgcccggctaattttgtatttttagtagagaggtttaggtttctccatgttggccaggctggtctcaaactcccgacctcaggtgatctgcccgcctcggcctcccaaattgctggggttacaggcttgagccaccgcacccagcctttttttgtttttttctttgagatggagtctcggtctgtctctcaggctggggtgcattggcacgatctcgtctcactgcaacctctgacctccgcctcctgggttcaagcaatcctgctgcctcagtctcctgagtagctgggattacaggtacccgccaccacgcccagctaatttttgtatttttagtagagacggggtttcaccatgttacccaggctggtctcgaactcctgacctcatgatccgtccatctcggcctcccaaagtactgcgattacagccatgagccaccacgcccggccttccattacttttaatggcattaattaattatgcttactaaaagttatggcagaaaccacaattactttcgcaataaaattagaaatggaaactgttatgctaccattctttttctttttttattttcttttgagacagaatcttgtcctgttgcccaggctggagcgcagtggtgcaatcatagctcactgcagccttgacctcctgggctcaagcaatcctctcacctcagcctctggcgtagctgggactatatgtgtgcaccaccacgcccagctaattttttattttttgtagagatgggggtctcagtatgtttcccaggctggtctcaaactcctaggctccaaagatcctcctgcctcagcccccgcaaagtgttggaattacaggagtaagccactgcacccagccgctagcattcttttggttttagcttcatatatatatatatatatatatatatatatatacacacacacatatatatatacacacacatatatatacatatatatacatatatatatacacacatatatatatacacatatatatatataattattattattttagagaaacatttcagttgggagcagtggttcatgcctgtaatcccagcactttggaggctgaggcgggtggatgacctgacgtcaggagttcgagaccagcctggccaacatggtgaaaccctgtctctactaaaaatacaaaaactagccaggcgtagtggcaggtgcctgtaatcccagctactcagaaggctgaggcagaagaatcgcttgaacccagaggcagaggttgcagtgcagtgagatcgcgccactgcacttcagcctgggcgacagagtgagactctgtctcaaaaaaaaaaaaaaagaaaagaaacattttattttattttattttatttatttatttttgagacagagtctcactctgtcacctaggctggagtgcagtggcgcgatctccactcactgcaacctccaactccctgattcaagcaattctcctgcctcagcctcccaagtagctgggattacaggcatgcgccactacgcccagctaatttttgtattttagtagagacagggtttcaccatgttggccaggatggtctcgatctcctgacctcgtgatctgcccacctcagcctcccaaagttctgggattacaggcgtgagccaccgtgcccggccaacattttattttagaatagttttagatttgcagaaaaaaaacagtgaggataatagaatttcccacattccctacacccaatttcccctcttttatttatttattaaagacaggctcttgttctgtcgcccaggctggagtgcagtggtgtgatcatagctcactgcagcctttgacctcctgggctcaagcgatcctcccacctcagcctcccgagtagctgggaccacagatgctcagtaccacacctggctaatttttttactttttttgtagagatggggtctcactatgttgaccaggcttttctcaaactcctgggctcaagcgatcctcctgcctcagcctcctgagtagctgggactacagccactcaccaccatcacgcccagctaagttttgtattgtttgtagagacgggatctctgtatgttgcccaggctggtctcaaactcctgggctcatgtcatcctccttcctcagcctcccaaggtgctgggattataggtgtgaaccactgcacctggctaagaaaaaaaaaataggagcaaagatcatccgcaaccatccctcagctgtttcatttctgtttattacactacatgcatatttcacttactttgggatactgagatgtggccccggatgggcttctgaggacaactccatgcctgtaggaagtcgctggccccagggcgctcagcgggtgggggcgattctgctccaggggacatttttattgtcaccgcgggggctgggagtgccgctgccatctagggatgtaggccagggatgctgctcaacactacagtgtacaggacggccccccacagtaaatgatcaagccccaagtgtcagaggtgccaccagacgtgacaagccctgccctggggagaactgagtgcaggtttggagtcagacttgggctcaaattccatcatggcgaaccagctcctttccctcgggcctctgcttttctttctctctcttttgctctttctctctctctttcttttttgagatggagtctcactctgttgcccaggctggagtgcagtaatgcagtcttggctctctgcaacctctgtctccctggttcaagtgattgtcctgcctcagcctcccaagtaggtgggatcaaaggtgtgtgccaccacgcccggctaatttttgtatttttagtagagacggggtttcaccatgttggccaggctggtctcaaactcctggcttcaagtgttccacccgcctcagcctcccaaagtgctgggattacaggtgtgagccactgcccccagccaacctctgctttcttatagcgggggtgtgataacagctgcttcccagtcaattggaatgtccacacaaattagaaactgaaacagtatctccatcaactcagagaaaacagtaaaaagaaaataggcggtgagatttctcatcagttacattattctgactttaattagtgtccagggaaactgaaactatagctatacctaagataaacatttgaagaaggagtaaaggaaagattaattttgcagctgtctcagggtctggtggagggctgatggatgtcatcctgtctttgttttgcaccggggaaagtaagcttgtaatcagtgctgtcaggatgaaattcagcagactggttccgtggacaaggggtcacatagagcttgtaaacctaaggttacgtatctttgtttacgggaggctggacatcttggaaagatttaggagtaagcaaagaatttacgtatgaacaatttgtgagggtgatcatctggagatgtgtgagggctttttttttttttctttttgtaggcatctgggtaagctacaatgcttaaccacttaacacaatcaggaagcaacagccatgcattcgggaaaggaacttcagtgttgtgtggctcagtctccagacctaactttccctttggtacagacgcggtggtacatgcctgtaatcccaacacttaggcaggaggatcactcgagcccagaagatcaagactagtgtgagcaacaaagtgagtttccccccacccctcacctcaacaaaacatttaaaaattagctggacatggtggctgcgcctgtggtggctggagtgcagtggtgtgatcttggctcactgcagcctctgcattcaagcaattctcctgcctcagcctcctgagtagctgggattacaggcacctgccaccacgcctggctaatttttgtatttttagtagagaccgggtttcaccatgttggccaggctggtctccaactcctgacctcaggtgatctgccactcaggaggctgggtaggaggatcccttgagcccaaggggtaggagggtcccttgagcccaagagatcaaggatgcagtgagccatgttcgcatgactgcacacctgcctggacaacagatgagaccatgtctcaaaaacaaacaaaccaatacaaacaacaacaacttttcctttggcaaactgcctttggaaggtcctcatatttttattttctttgacaggaaaaagcaatatatagaaagtgcttagcttagcactttgtacattacagttccccatcatagtttgcccttgtcatttgataagttttggacttgactgcaggctttccttaaactgaactcccagaagtggggttactgggtccaaggggatgcctatgtcccaagctctcacttcccataaagaagaattcagaattcggccaggagtggtggctcacacctgtaatcccagcactttgggaggctgaggtgggtggatcacctgaggtcaggacttcgagaacagcctggacaaaatggtgaaaccctgtctctactgaaaatacaaaaattagatgggcttggtggtgggcacctgtaatctcagctacttggaaggctgaggcaggagaattgcttgaacccgggaggcggaggtcacagtgagccgagatcgcaccattgcactccagcgtgggctacagaacaagactctgtctcaaaaggaaaaaaaaaagaattcagaattcacctgtcgcctgctgctgcagtgaacagtgagtggcactcctctctcacacctatcacaggtattcttcttttccttccagatccttccctggcaccggttccaggaggacctcgttcttaggcagcatctgtgtctctgttttgtaagacacacagagtatccttaacccactgcagatatttccctgggtccatggtcaatcaacaccacctttcagtctccagcctcttaaccagcccagggctgagtgttgtttatagtattaatatgtttctggctgggctcagtggctcatgcctgtaatcccggcactatgggaggctgaggcaggcggatcacttgaggtcaggagttcaagaccagcctggccaacatagtaaaaccccgtctctactaaaaatacaaaaatgagccgggtgtggtggcgtgtgtctataatcccagctactcgggaggctgaggcaggagaattgcttgaacctgggaggtggaggctacagtgagctgagatcatgccactgcactccagcctgggcaagaaagtgagactccatctcaaaacaaagaaacaaacaaagtattaatatgttccccttgatcagtggggtggttcacccttgtaatcccagcactttgggaggcagaggctggcggatcgcttgagtccaggagttcgagaccagcctgggtgaactagcaaaaccctgcctgtactaaaaatacaaaaattaactgggcttggtggtgcgagcctgtaatcccagtggaggctgagacaggagaatccttttgtaatgcctgaccttgtttttttactaaccctattttaaccttgtttttactaaccctatttttaaattttccctttttgtctccttaattacctagccttgtttcccatatgagtagactctcccttagctgggaaagcctgacgaacgccatctggccccttgatttacaagacattaagggctacttacccaacccccttcctcaaagagttaacctgcgtaagcagatcctcagcatttcaaaggagcccaattagctgataaggtactggaacaaacaatgtacgaagttcccaggattttgctcaaaagcataacaacataaagccttgagtctgtgtctggcatagcatccatatctaactcttatgaaggatttagagcccggcacctggttccgttgctttttttgtaaccatttgtcttttaaattgtttatttctctgtaaccatttgttttttgattcttgcatgtttttacttctgtagaattattgcatttgagctccgctccccttccgaaccaaggtataaaagtaaatcaagccccttcctcggggccgagagaattttggaaagtcaagccttctcttggctgccggcttaaataaaggactcttaattcgtctcgaagtgtggcgttttctctaactcgcttgggtataacactttgagcctgcgaggcagagtttgcagtgagccgagatcacgccactgcactccagcctcggcaacaagagtgaaactccgtttcaaaaaacaaaaacaaaacaaaacaaaagaaccctcacaatcttcctgcacccaactgatgaaatcaccattgcaaaagttatatcagtgagaacattagaacagtaagctaagctaacccaaaccccaccttacttttcccttaattattcctgggctactgggtcgagctaactttggaagacatttaggctatggtttaaataacaggccttgccaaaaactcaaccacttatttttttgagacggagtcttgctctgtcgcccaggctggagtgcagtggtgtgatctgggctcactgcaatctctgcctctgggttcaagcaattctcctgcctcaacctcctgagtagctgggattacaggcgcatgccactgagtagctgggattacaggcgcatgccaccaagcctggctaatttttgtatttttagtagagacagggtttcaccatgttggtcagactggtctcgaactcctgaccttgtgatccacccacctcagcctcccaaagtgctgggattacaggcttgagccaccgtgcccagcctgctttttttttttttttttccttgagacagagtctcattctgtcacccaggctggagtgcagaggcaccatttctgctcactgaaacctccacttctggggctcaagcaattctcctctctcagcctcaggagtagctgggattacaggcgcctgccaccaagcctggctaattgttttgtatttttagtagagatggggtttcacccatgttggccaggctggtctccaactcctgacctcaagtgatccgtccaccttggcctcccaaagtgctggggtgacactgtgcctggtctcaaccaccctttttttttttttcctctgtcacccaagctggagtgcagtggcatgatcttggctcactgcaacttccgccttctgagttcaagcaattctcctgcctcagtgtccggagtagctgagacgacaggtgtgcaccaccaccccctgctaatgttttgtatttttagtagagatggggtttcaccatgttggccaggctggtttcgaactcctgacctccacccgccttggcctcccaaagtgctgggattacaggagtgagccatcactcctggcatagaaagtttttctcatccattgtcctcctcctcttctttcttcatcttcctcttccacttttttccaggcaactttagcaggaccctttgcaccgtcaaactttcctttcaacttacagtcagcaacctcttcctcatatttcttcttcagctttgccgccttagtgacgtcaacctgcttttcactgtcacttcagctattccacatctcacccagagctttttttttttttttttttttttttgccacatctccaatagagatgccagggtttgcggatttgatcttggggtggaattctgaacagaacatgaagaatccagacagttggttgggtgtgatggctcatgcttgtaatgccagcactttgggaagccaaggcaggtggatcacctgaggtcaggagtttgaggccagcttggccaacatggtgaaaccccatctctactaaaaatacaaaaattagccagacgtggtggtacgcgcctgtggtcccagctaatctggaggctgaggcaggagaatagcttgaacctgggaggcggggcttgcagtgagccgagattgcgccactgcactccagcctgggcaacagagcgagactccgtctcaaaaaaataaataaataaataaataaattttaaaaaataaaataaataaattaaataaaataaaaaataagagtccagacggtggccttttggggacattaggctctttcttcttgcttcccctttagctgctctataatccttcatttcccgatcctagtgtactttatccgcctttgccatttcatcaaatttggacttctctttcactgacactgtcttccaactctcagaatatttcttggaaaattctgcaaaattgacagggacctctgggtttttcttcttcttcttcctttttttttttttgagatggagtttcactctgtcgcccaggctggagtgcagtggcacgatctccgctcactgcaactttctcctcccaggttcaagcgattctcctgcctcaggctcccgagtagctgggactataggcgcctgccaccatgcccagataatttttgtatttttagtagagacggggtttcaccatgttggccaggatggtctcaatttattgacctcatgatccgcctgccttggcctcccaaagtgctgggattacaggcgtgagtcactgtgccaggccggtttttcttcttatgttcttctctgtacatctgcacaaaaaaactataagcagacattttgccctttggtttcttggggtcaccattagccatcctgactgtattgtttgctagtctgggcagcgcaggacacttgttcgctatttttctaaacttttcccccaatgggtgtaaaaaagcatattattattattattattattattattattattgagacgagtttcgctcttgttgcctaagctggagtgcaatggcgcgatctcagctcattgcaacctccacctcccgggttccagtgattctcctgcctcagcccccttagtagctgggattccagacgcgcaccaccacgcctggatagttttttgtacttttagtagaaacggggtttcaccatgttaggctggtctcaaactcctgacctcagatgatccgcccgcctcggcctcccaaagtgctgggattacaggtgtgaaccactgtgcccggcttaaaagcatattattatagtaaatactttttttccctttctttctttcattttaaacactggggtctccttatgttgtccaggctagattcaaactcctggactcaagcgatcctcccacctcagcctccctgttaccctgttgccatgacagccctgataaaataactgggaaagttctctttcttattgtaagtccaaaaaaaaaaaaaaaaaaggcacagctgcttaaagattgcagacagccagggatgtccccagaccttcttgacccctgaccagataccagaggaagataagatccctaaatcaccacaaactggaacagacgacctctagtcgactttagatcatcaatatataattataatgctaaaattccttctcttaaaagaaaatctccattttgtgtagatgggttgtatgaagacaacccaggaattgaggctcatgaattgagcctgcgtgtctggagtcccaccctgcacatgctagcattcctctcccttcctgtacccaggggaagaaacaataaaacgttatgctttttactgttgagggagaaggggcagttagagtgagagcctctccttctccattcctggccagtgaataaaacctgattgccttttccgattggatgttccttctttgccacctacacaaagtggggaggtaactcggtttgctggtggcatcctcagtagctgggactacaggcaataaattcttttatacgtcgctttttaaacgtattgtgcctgtgaacaaatcttcaagttatacccaagatttcaaagctcatgatggtccatagtactcgctctttaaatcaatagctgcgtatcccacagatgatttcctttgggatgatttcccagaactggaattgcagattcttcacaatgcatttttagtagagaaggggtttcaccacgttggccaggagggtctcgatctcttgacctcatgatccgcccgcctccgcctcccaaagtgccgggattacaggcgtcagccactgcgcgcggccacaaagctcccaacttttccgttaagcaccgagcttttttctagactagcagctgaggccggaaggaattctggggaacgtagtgcagacttgcagagaacgagtctcttggtcctgtgccgtagcatttccggcggaagttgctgggcgcggaaagccggcaagacctttttttccgccatcatcgctcacgcgcgcaaccctggcgacgcgtggtggcgaggctccgcctccccacgccattggccagcagctcctcgggcacgcgtatactgcgcttccgggcaatctccgccccccccccccgcatggccttctgggagttgtagttcggtcgcgagcgctgccgtcgggaggcgctccgaggttcgaggctgtgccccgcgaccccgccttcggcgctcggctcgcaggatggatcccgtacccgggacagactcggcgccgctggctggcctggcctggtcgtcggcctctgcacccccgccgcgggggttcagcgcggtgagcggcgtcgaggggcgggggtcgaatgggggaggcagtcgctgtggggtgggagtccggcgctgacccgcgtcctcccggtagatctcctgcaccgtcgagggggcacccgccagctttggcaagagcttcgcgcagaaatctggctacttcctgtgccttagttctctgggcagcctagaggtaagaggtgcccaccttcggaaccaccagggtctgcccacctcccctgcccattcacggtgccctatgccaggtgcgctgtccccgctgctagccaccctcgccgtgtcccccttccacccccagaacccgcaggagaacgtggtggccgatatccagatcgtggtggacaagagccccctgccgctgggcttctcccccgtctgcgaccccatggattccagtaagggctgcttcggaggcgagagttgtccgggtcccttgcagggaggagcgggggaggagggacgacgggcgcgcggtatctgagcctcggctgccccctggcacacggggtgatgacagggttggctgaggactcagagccctgccctagggtggaccgacatcccctgtcctgattcaaaatgtgtgatatgattggcacagcctgcatcctcgagttaagtgttcagtccacgccacctgtttcactactgttgtgctacttgtgtctttttacaccatagccaagcaaaaccactgcgcagttttctttttcatttccaggctttgcacacgccgcttcctctgcctggggcactttttctctcctttttgtagctcattctccgtcctccgtcagatgtcaccttcacccttccctacccctcctcttctgggcccacaaccctagtgcagccctcccagccccacctgaactttcccaccctttcttgtcatttttatttgactcaggctatattcattcatactagagttggcaaacctttttttttttttttttcttcagacggagtttcgctcttgttgcccaggctggagtgcaatggcgcgatctcagctcaccacaacctccgactcccgggttcaagcgattctcctgcctcatcctccagagtagctgggattacaggcatgcgccaccacgcctggctaattttgtatttttagtagagacggggtttctccatgttggtcaggctggtttcgaactcgtgacctcaggtgatccacctgcctgggcctcccaaagtgctgggattacaggcgtgagccaccgcacccggccaaactttttttctttattttttcttagagttggcaaacttttatgtaaagggccttatagtaaatattttaggctttacagggcagatgatgtgttttgcatattcaatttttttacaattccttaaaaatgtaaaaatcactcttaacacatcagctgtatgaaaccaggccttaggcttggtgtggtggttcacacctgtaatcccagcactttgggagcctgaggcgggcagatcacctgaggtcaggagttccagaccagcctggccaacatggtgaaaccctgtctctactaaaaatacaaaattagctgggcatggtggtgggcgcctgtagtcccagctacttgggaggctgaggcaagagaattgtttgaacctgggaggcggaggttggagtgagctgagattgcgccattgcactccagcctgggcgacagagtgagactctgtctcaaaaagaaaagaaaagaaaacagaccttgagccagatttggctcatgggtgctagttgtccaacctctataggattagagggctcatggaaagtaagttttgagggccacgatgggcacccagctctgtccgattccacagctagccaccccatgaatgcagcttcatatcaccaaagatcagcctactccagcggttcctaaaggctgcatggaatcccctccttcatctataccattcatgatttaaccactcctcccacccccatccccaatgttgtccatgtggctgccttaaacagcaccctggcgagcctcatcctagagtcatctttgggccttcccacccctgcctggcttccctctctcactcccctaccccccactcccagaggcctctgtgtccaagaagaaacgcatgtgtgtgaagctgttgcccctgggagccacggacacggctgtgtttgatgtccggctgagtgggaagaccaagacagtgcctggataccttcgaatagggtagggccaccccccagtgtctagccaccttccctgccctcccaactcatgatctcaccaatctgaccctcaaggacacccctgaggtctcctgttccttcttctaccttctgagcctcagattctgcatgttaaaaccgggacatatatatcatcttgtaggactgtcattaggagtcagtgacttggtgtctaaagtagacataacaggactgggcgcggtggctcacgcctgtaatcccagcactttgggaggctgaggcgggccgatcacaaggtcaggagatcgagaccatcctgactaacatgttgaaaccccatctctactgaaaatacaaaaaattagccgggtatggtggcacacgcctgtagtcccagctacttgggaggctgaggcaggaaaatcacttgaacctggaaggcggaggttgcagtgagttgagatcgcgccactgcactccagtctggggcgacagagcgagactccgtctcaaaaataaaataaaataaataaaaataaagtagacagaacggtgatttgaacccagcagtattagtttggtgtggtgcttcgggtgtgggtcaagatgctgaaacaaaaatcccccaaaagactgggcacggtggctcacgcctgtagtcccagcactttggaaggccaaggcgggcggatcacctgaggtcaggagttcgagaccagcctggccaacatggtgaaactccgtttctacttaaaaaaaaaaaaaaaaaaaaaaaattagctgggcatggttgcctgtaatcccagctaatccagaggctgaggcaggagaatcgtttgaacctgggaggtggagattgcagtgagtctagattgcgccattgcactccagcctgggcaacatgagcgaaactccgtccccaaaaaaaaaaaaaaaaaaaattcccccaaaagacagaggtcacctgcatgcccgggtcccccgccttctccaggggctatcctcaaccctggccccacaccgggccagcatccctcccaccttccctcctggtccagggacatgggcggctttgccatctggtgcaagaaggccaaggccccgaggccagtgcccaagccccgaggtctcagccgggacatgcagggcctctctctggatgcagccagccagccaaggtgagtcctcaggcaccggagtgggggtggccgttgtgggaggatgaggcttaacctgagtcatcccacctccagtaagggcggcctcctggagcggacagcgtcaaggctgggctctcgggcatccactctgcggaggaatgactccatctacgaggcctccagcctctatggcatctcaggtgagcacagagtggggaaactgaggcgtggaagtggagggtgtgactgtcttgagattacacaaccaggaaggatcttcctacttccctctcccaactctggattctgtaaagactgaaggagccaggctgtgcgggttgggcctctgtgggtggggtgggcagttccctacacctcacctcctcccctcgcacgtgtttttcagccatggatggggttcccttcacactccacccacgatttgagggcaagagctgcagccccctggtgagtcggggtctcagggagcctgggtctgcgcctgccatcaccattctgggtgccaggacatccctgtatccagtgccccagcacagagggccacatcctgggttggggctggagtgtgtcacctccaggtggcagctggaaggtcttcagtcttagaatggggagggatccatccagagaaagcagctggacaccagtagctagaggctgtgacaagaagggggagggatgctgggcatggtggctcacgactgtgatcccagcactttgggagaccaaggcaggtggatcacttgaggccaggagatcgagaccagcctggccaacatggtgaaacctcgtctctattgaaaatacaaaaattagccaggcgcggctttagagactttgtctctaaaaacaaaacaaaacaaacaagaaaaataagggggagggatgtccgagggaatattcggggagtgttggggggagggcaggaccccttgaagacgaaggaaagggggtttcaggttgagatcgggcccaaggctgacccacctctgcccgccaggccttctctgcttttggggacctgaccatcaagtctctggcggacattgaggaggaggtgggtgcagggctagggaggaggtgggtgcagggctagggaggaggtgcctgaggggccggcacccgcccctcgtccgccccaggctgtcccagttttccccatccccgctttgccccagacacacaccatctctccagggcagaagaccactcaagtccctaagtacccactctgccattcctcagtcactccccctttggccctctctttactctggcacctgttcactctctctctccccatcccccagtataactacggcttcgtggtggagaagaccgcggctgcccgcctgccccccagcgtctcatagtccctcacccttccgcggaaagagcccccttactccacctccccgccagcctggggccaccccccctcactgcatcctggggccacccccactcactgcatcctgggaaccttcgccctgcaaggcgtttgctatcttcagccactgggcggagctgcagccctggaggagggggcgggtcgaggctgcgtggtgatggggtctccgcccccacgccctgccgggcagggctggagctggacagaagccagtgcctttaagtcatttgtgtcaaaaccctctggggtccggaggctgtgcgggtgtcctcctggcaataaacactacccggttctcgccctctggagtcctgatcctgccgcctgtccacactaggcactcttgcaccgggcaagtgggtgaaatcatggcagggaggcggtgctgctgggtctcccgtttgttgttgttgttgttgttgttgtttgtttgtttttttctgagacgggggtctccctctgtgtcccaggctggggtacggtggcacgatctcggctcactgcaacctccgcctctggggttcaagcgattctcctgcctcagcctcccgagtggttgggattacaggcgtccgccactacgcccggctaattttttgtattttctatagacggggtttcactgtgttggccaggctggtcttgaactcctgacctcaggtgatccgcccgcctcggcctcccaaagtgctgggattatgggcgtgaaccatcgcgcctggcttgggtcttccattctacagagtgggaaacaggctcagggagtgagtgagtctggattctagatcatagagaagaccttgtcccggcccttcatcattgggcataataataaaacaagtactgtttctactgcagtggccacatccccaacacgcgatacaccattattacctcattcagtctccctacaacccactgggaagctcaggttttgttgccattttccagataaagaaactgagatggggatgctaaggccacaactgggactgaaacccagcaattgctgtcttttttcttttcttttcttttctttttttttttttgagacagagtcttgctctgtcacccaggctggagtgcagtggcgtgatctcggctcactgcaagctccacctcccaggttcacgccgttctctggcctcagcctcctgagtagctgggactacaggcacccaccaccacgcccggctaattttttatatttgtggtagagacagagtttcaccgtgctagccaggatggtctcgatctcctgagcttgtgctccaccctcctcggcctcccaaagtgctgggattacaggtgtaagccacagcgcccaggccttttttttttttctttctttttttttttgagacagcgcctcatgctgtcacccaggctgggtgaagtggcatgatctcgactcactgcaacctctgcctcccagattcaagtgattctcctgcctcagccggcaccccttgctgctgagtagctgggactacaggcttgggccaccataaccagctaatttgtattttgtatttttagtagagacagcgtttcaccttgttggccaggctggtctcaaagtcctgacctcaagtgatcccccgccttggcctcccaaagtgctaggattacaggtgtgagccactgcgcccggcccaggccacaccattttcatccaccaattcatacaaccttgttttatgtacatttgtttaaaaacaccttatttaatatctatggtggattcatttacattgaactcacagccaacagcaccgaaactcacgtctgcataaagcttctctataatggattttctccatgaggtgcatcacagacttttttttttttaagtattttatttttggcatgatcatagctcactgcagccttgacctcccgggctcaggtgatcctccaatctcagcctcctgagtagctgggactacaggctacactgggctaatttaaaattttttttgtactgatgggggtctcactatattgcccaggctggtcttgaactcctggccttgggcagtcctcctgcctcggctcccaatgtgctgggattacaggcatgagccgccgagcccagccattgcagccttttggtacttaggaagcctggacagcatttcggtgtctgggggaatttcaatggcaaaatcaccaacaaaaaccacaagaacatggccaggcacagtggctcatgcttgtaatcccagcactttgggaggccgaggtgggtggatcacctgaggtcaggagttcgagaccagcctggccaacatagtgaaaccccatctctaccaaaaatacagaattagccaggcttggtggcaggtgcctgttatcccagctacttgggacactgaggcagcagaatcgcttgaaccctggtgggtggaggttgcagtgagctgagattgtgccactgcactccaggctgtgcaacaagagtgaaactccatttcaaaaaaaaaaaaaaaaaaaagagaagaaattcaccaccctaaactcacaccttccttctcccataagtgcatgcccatggacgtgtacgatggctgctatgctgctgtttctcctctgggctgttgtagtcttgtggtggcccacattctgctgcagttggaaacatccccagatctctgtggtttagaaaagctggccaggcatgatggctgatacctgtaatcccagcactttgggaggccgaggcaggcagatcacctgaggtcaggagttcgagaccagcctggccaacgtagtgaaaccctgtttctactaaaaatataaaaattagctgcgtgtggtggcacacgcctgtaatcctagctgcttgggaggctgaggcaggagaatcgcttgaacccgggaggtcaaggttgcagtgagccaagattgcaccattgcactccagctttggcaacaagagtgaaactccatctcaaaaagaaaaagaagaactaaggctgtcatacttggagtctcacatctgtaatcccagcacttttgggggctgaggcacgaggatcgcttgaggccaggaggtcgaggctgcagtttgctatgattgcgccactgcactccagcctgtgtgacagagtgagaccctgtctctaaataaataaataagtaaggcagggcacggtgtctcacgcctgtaatcccagcactttgggaggccgaggcggacggatcacctgaggtcgggagttcaagaccagcctgaccaacatggagaaacccccgtctctactaaaaatgcaaaattagcggggcgtggtggcgcatgcctgtaatcccagctattcaggaggctgaggcaggagaatcgcttgaacccaggaggcagaggttgtggtgagccaagatcgcaccattgcactccagccttggcaacaagagcgaaactctgtctgcaaaaaaaaaaaaaaaaaaacagcctgggtgcagagcaaaaccctatctctaagtaaatgaataaataaatagcaaagctaaggcttatttcttagcggcaatagactttgttagttgtagtggtacagaaactggcctaatgggagggtcattttctcacagtgaggacggtgttgtctaaagaaacatccaagcttttaaataattaaagttggccagccatggtggctcacgcctgtaatgccagcactatcggaggctgaggcgagaggatcacttgagcccccgggagtttgagaccagcctgggcaacacagcaaggccctgtctgtacaaattaaaaattagccgggcatagtgatacctgcctgtgtagtccctgctactcgagaggctgaggtgggaggatcgcctgagtctgggaggtgaaggctgcagtgagctatgattgcataactgcactcctggctgggtgacagagcaagaccctgtctcaaaaaaaaagaaaaaaaaaatttgggactgggtgcagcggtggctcacacctgtaatcccagcactttgggaggccaagctgggaggatctgttgagctcaggagtttaagggcagcctgggcagcagtgaaacaccatctctacgaaaaaaacacacatgatcgggcatggtggctcacgcccgtaatcccagcactttgagaggccaaggtgggcggatcacgaggtcaggagttcaagaccagcctggccaacatggtgaaatcccatctctactaaatatacaaaaaaaaaaaaaaaaaaaaattagccgggcatggtcgtgggtgcccgtagtcccagctactcgggaggctgaggcaggagaattgcttgaacctgggaggcagaggttgcagtaagctgagatcacatcactgcactccagcctgggcaacagagtgagactccctcttaaaaaaaaaaaaagaaaaaagaaaaatccacacacatatataattcagatgattgttaaaagtaaacaaggctttattcaagactactgcatggaagattgagctcaactcggaatccacgaagttgtcaccaaggggggatttatagccacggagcagggcaagggggggtcagtggatagaaaattataaaggcttggggagtcaccttaaactctcttaataggatccttgctgaagccaggccagggcgatcagctatcaagaaactgacttagcaggattcttgctaaaactgggcgacacagatcaaagacaggatgggagccaaggtcacggcccaatgcagaagagatttcagaggactctgactcaagtttggccaagaagagagtctttgtcggggcggagacctggcctggccctgggaatctgagacgggggacagtgcgttctcctggaaggggaggtgagcggggatgatgcaaaacgtacgccctttccccaaactcttcagctgccttggaaaaactaggtctctgatgctaaggcacctgcctgcatctcctggctcccggcacacggatcatctgccaggtctcgcccaggctcctctggcgccagccacagaacccgatccagccagaaagcaaatgccgtttgtcctctctgccgtccttctcagctgccccaaaagcagccccagatctcatttcagggagtctgtgtgtgaccaggggcctgaggatgatccatcctggccttgggtccaactagaccaattgtcactgatgacagggccactcaccctgcaaaatcccagtcctctgagcccaggcaggcctggggactgcatcacgcaagggttagaggggcccgatggagcctaccccacctgcttctgacttgggtatcatcaatcctaacatttctgggctgagcttacatcatcttgggctactgaggaaggagctgagggccctgggaaccacagcactaagtccaggatccgtgcctatccttctcttcttttattattattattattttttgagaccgggtctcactctgtgacccaggctggagtgcagtggtgcgatctcggcagctcactgcaacctccacctcccgggttcaagtgattctcctgcctcagcctcctgagtagctgggattacaagcatgaaccactacacccagctaatttttgtagtttttggtttttttttttttttttttttttttgagacggagtctcactctgtcgccaggctggagtgcagtggagcgatgtcggcccactgcaacctccatctcccaggttcaagcaattctcgtgactcagcctcccaagtagctgggactacaagtgcccaccaccacgcccagctaaattttttgtttgtttgtttttgagatggagtttcattcttgttgcccaggctggagtgtgatggtgcagtctcagctcactgcaacctctgcctcctgggttcaagcgattctcctgcctcagcctccctagtagctgggattacaggcgcccaccaccacgctcggctaatttttgtatttttggtagagatggggtttcaccatgttggtcaggctggtctcgaactcctgacctcaagtgatccgcccacctcggcctcccaaagtgttgggattacaggtgtgagccaccgtgcccggtccttatttctgtatttttagtagagatggggtttcaccacgttggccaggctgatcttgaactcctggcctcaagtgatccacccgcctcggtctcccaaagttctgggattacaggcatgagccaacatgctggcctaatttttgtatttttagtagatatgaggttttactgtgttggtcaggctggtctggaacagctgacctcaagcgatctgctcacattgacctcccaaagtgctgggattacaggtgtgagccaccatgcctggccatttctcttttcttgagacaaggtctcactctgttacccaagctggagtgcggtggtgcaatcatggctcaccgcagccttgacctcctgggcacaatctatcctcccatctcagtctccctagtagctggaactataggtgtgtgccaccacacttggctacatttttacttttgtagagatggggtcttgctatgttgcccaggtgggtttctctcctattgcttactcccaggctccacaggggcatgggtactgagagtggcatttctggatagacgtgatcccagctcctctactcaatagctgctgaccttgagctgcggcttaaacttctctgcgcctcagtttctccatctttacaatgggaacctcaacattcctcatctcatgggatacgtgtaagggagaatgcataggacccgtgtctctcagctgcccctgatgactcttgaagaaacacctcttgactctgacaggcctttgaaggtggaaggtttctgcagcctgacatccaggcagaatggatgatgtgactccccgtgagtggcctctgctagtggcaaaccctatacttcctgtattcaaaagtggcagaggggctgggctctgtggctcagccctgtaatcccatcactttgggaagctgaggtgggaggatcacttgagtccaggagtttgaggccagcctgggcaacatagggagaccccagtctctatagtatttttttttttttccaagacagagtctccctctgtcacccagtctggagtgcagtggtgtgattgtggttccctgcaacttccatctctggggttcaagtgattctcctgcctcagcctcctgagtagctgggactacaggcgcccaccaccacccccggctaatttcttttttttttgacatggagtctcgctctgtcgcccaggctggagtgcagtggcgcaatcttggctcactgcaagctccgccttttgggttcatgccattctcctgcctcagcctctcaagtagctgggactacaggcgtccgccaccatggccagctaatttgtgtgtgtgtgtgtatttagtagagatgaggtttcaccgcattagccaggatggtctcaatctcctgacctcgtgatctgcccgcctcagcctcccacaagtgctgggattacaggcgtgagccacggcgcccagcctaatttcttcctttcttcctttctttcttcctttcctttctttcctttcctttctttcatctcttttttccttttctttcctttcttttccttcctccctccctccctccctctctctctctctttctttctttctttgtatttttagtagagacggtgtttcaccttgttggccaggctggtcttgaactcccgacttcaagtgatctgcccggttcagcctcccaaagtgttgggattacaggtgtgagccacagcgcctggccatgaccagctaatttttgtatttttagtagagatggggttttgccatgttggccaggctggtcttgaactcctagcctcaagcaatccgactgccttggcctcccaaagtgctaggattataggagtgagccactgtgccctgcctacttttcttttaaacagatagggtcttgctctgttgcccaggctggatcgtagtggttcaatcactgctgatcttcttgcctcagcctctcaagtagctgggaccacaggtgtgcaccaccatgcctggctaatttttaatttttttgtagagctggagtctccctatgttgcccaggctggtcttgaactcctggcctcaggtgatcctcttgcaagagaacatctttgacagatactgtccacaccctagaacataccagaatgctgacagagcttgtgtttgcgaggcctgtggaattaatggagacatttctacccttttcgactggggccttgtgcctatggcttgttgggtaggggagatcacctccgtttgtaaagaacgaaactgagtttgcattactgttccttaaggcaggtctgcccagctcccggaacactctgaaagccgcacgccaaacccatatcaggtgcctggagtctggaggttttggctgcagccccaggaccagccttgccctgcgcctcacctgattctggctgagataggaagatgctcggtaactcagctccccttccaggcagtgcagacgagggggcggttttcagccgggcctcccaagttggaaccttatcatttccaaggttcaagtttgaggtatcaggaggaagagcagggaccagcctagggtgaggttgctgaggtgcccagggtgcaattttttatttatttttatttatttattttttgagacggagtctcgctttgtgcccaggctggagaggagtggtgcggtcttggctcactgcaacctccgcctccctggcttaagtgattctcctgcctcagcgtcccgagtagctgggattacaggcacccaccaccatgtccagctaattttctgtatttttttttttttttttgtgggggacggagtcttgctctgtagcccagactggagggcagtggcacaatctcagctcactgcagcctccacctcctgggtcccggttcaagcgattctcccgcttcagcctcccaagtagctgggattactggcatgcgtcaccatgcccatctaatttttgtatttttagtagagacagggtttcaccaagttggccaggctggtcttgaactcctgacctcgtgatctgcccaccgtggcctcccaaagtgctgggattacaggcatgagccactgcgccggccttgctttatttttgtgtgtgtgggagggagcatggtggcacacccctgtaatcccagctactgggtggctgtggtagaattgtttgagcctgggagttcgagaccagcctgggcaatatagcaaaacaccatctctacaaaaataaaaaatacaaagattaaccaggtgtggtggtgcatgcctgcagtcccagctactctggatgctgagtcaggaggatcacttgagcccaggagtttgaggctgcaatgagctatgatcacaacactgcattccagcctgggtgatagagcaaacccctctctttaaaaaaaaaaaaaaaattaaaaatgtgttgaggtgaaaaatcacattaacataaaattaaccatttagaagtatacaattcaggccaggcgtggtggctcacgcctgtagcactttgaggggccaaggtggatggatcatttgaggtcaggagttcgagaccagctggccaacatggtaaatcaccatctctactaaaaatgtaaaaactatccaggcatgatggcccttgcctgtagtcccagctacttgggaggctgaggcaggagaatcacttaaaacagggaggcggaggttgcagtgagccaagatcgcgccactgcactccagcctaggcgacagagtgagactctgtctcaaaagcaaacaaacaaaaaatgtaaaaactagccgggcatggtggccctttcctgtagtcccagttacttgggaggctgaggcaggaaaatcgcttgaacccgggagacggaggtggcaatgagccaagattgggccattgcactgcagcctgggccacaagagcaaaactccatctcaaaaaaattttaaaaaggccaggagcagtggctcacacctgtaattccagcactttgggaggccgaggcaggggatcacttgaggtcaggagttcgagaccagcctggccaacatggtgaacccgtctctactaaacatataaaaattagccaggcatggtggtgggtgcctgtaatcccagctactcaggaggctgaggccggagaatcgcttgaacttgggagacggaggttgcagtgagccgagattgtgccactgcactccagcctgggagacagagcaagactctgtctcaaaccaaaaccaaaaccaaacaaaactaactggtggagcatgcgtcccagcctggggactacaaggggcatggcctggctctcacttttgcccttccttcccccgacccaagtcccacccatgggcctgggcttggccacgcagcacaattgaacattgagtaacacacagatagtgaatatcagagtttacttgtgggttgtgcaagacaggagacctttggagacccctctgttatttccttgagccccagaaactacccatgcctacaccccaaaagcagcagcagcatgagaacgattaacacacattgaggacctattgtgtgggggtccccggaatgcctcacatgaagtcatgtgtcttgtcagagcccttggagacagggccacttcgtgtccccatattacagatgaggaaactgaggcacaaagcagctaagccctcagccatgggtccacagccaggaacctgggtccagctctccagccgtgcccctggccctgggctgctccaagcttggcacacatggatttgaaatgttcacagcccgagggggtgcagtggattttgcagagtctgagacttgcacatcagcagcatggagattatggggttcaggtgagaatcctggctctggtgctcagtcctggccgtgggccccctggtgagtcactgcctctcttggggcctccgtttcctcatctgtgaaatggatggagacacttagagaatcactgcctaagccccccgctccccttatgcctgtaacagaatctcatccatctggacagccacatttcccagcctcccctgcagcaaggtatggccatttcgctctgttctggccagtgggatataaaaagaagggtttcgaggcttcctgggaagacttccaggagacacctagccagcgctggcctctgactttccctcagaatgaggaggtgaaggctggagctctggcaattattttgtgccacgaggcaaccttgaggacaaaagccaaggatgcaataaaatgagagaaaaatcaagtcctactgctactgcagctgaacccgaacctatctctatggtatccttttcttacaccaggtctctattcctcatccctgggctcacaccagtgtggagtccttccccatgctccctggtctgtggcccagcattcgacgcatctcgtgcgtaaccccgtcccagtgccccaggccagccgacagtgtccggtgcattctggatgcaggcaggctgctctcccagcctccctccagggctgcaggtgctgtggcagtggccatggacccaaaggggtccccaggctctggacaggttgaatagggggtccgacgatggataccctgctgaggctgagctctggggctggccttggagacttcggcagggcgggcgaggtcgtcttcaaaggatggcggggacaactcatggagcccacggcgggcagcccgggcagcccggaggagagtgtgggtcagcacagccaccagaaccagggtgcccgagccgaggatggaagcagctgctgcgcctgtctcgatctcgaaaagtagcaaggcatagatggacagtgctagggaaggaaacgactctcatttattcagtcaacaaacatttgccctccaagccctcagggagttcttgcacacagggagaaattacgaaaagccctgccacatgacaggcacatagaataggcatttaatcctcccacatcccactcgtgcatcatcatcacatccattttacagagaagaaagctggggcccagagaggttaggggactcctcaaagccacacagccaggaagtgacagaggtgggattttaacccaggctggtgggctccagagtctgtgctctgaagcacagtgctgcctccgaaggagacaacagaaagagactaatttcagcagctgtgggccagggcttccctgaggaggagctatttgagctgagaccctggggaagaagcagcagtttttgggagagctgaggaggatgacagctgcagggacatggcaagtgcagaggtcctgaggtggaaacacccaagagtgtccgaggctcagaaaaaagcaaaacgggttctggccgggctcagtggctcacgcctataatcctaacactttgggaggctgaggcaggtggatcacttgaggtcaggagtttgaaaccagcctgtgcaacatggtaaaaccctgtctctacaaaaaatacaaaaattagctgggcatcgtggcgggcgcctgtaatcccagctcctcaggaggctgaagcaggagaattgcttgagcctgggagatggaggctgcagtgagccgagatcgcaccactgcactccagcctgggtgacagagtgagactcagtctgaacaaaaagaaaagaaaaaagaaaaatgggttgtgtagctggagcagaaaggtggagaggtgggggagagatggaggagttaaggaaggagtggatgttggggaccagatgagggtgggggccacagaaaggggtgtgggtcttctccttcttctccttcttcttctttttcttcttgttcttgttcttgttcttctttttttttttttgagacagggtcttgctctgtcacccaggttggaaggcagtggctcggctacagctcactgctgcctcaacctccccaggctcaggtgattctcccacctcagcctcctgagtaggtgggactacaggtgcatgccaccatgcctggctaattttttttttttttttttttgagacagaatcttgctctgtcacccaggctggagcacagtggtgtgacctctgttcactgcaacctctgcttcccgggttcaagcgattctcatgcctcagcctcccaagtagctgggattataggcacccaccaccacgccagctaatttttgtatttttagtagagacagggtttcactatgttggccaggctggtcttgaactcctgacctcaggtgatccgcccaccttggccttccaaactgctgggattacaggcatgagccactgggcccagcctgatttttgtatttttagtagaaacggggtttcgccttgttgcccaggctggtctccaattcctgagcgcaagtggtcctctagccttggcctgccaagagggctgggattacaggcgtgagccactgtgtcctaccgggttttcttctaagagcaatgagtagggggattttggagctggggaggaacaggacctacctgctctatctttttttttttttttttttgagactgagttttgctcttgttgccgaggctggagtgcagtggcacaatctcagctcactgcaacctctgcctctcgggttcaagcaattctcctgcctcagcctcttgagtagctgggattataggcatgcaccaccatgcctggctaattttgtatttttagtagagacaggggtttcaccatgttggtcaggctggtctcgaactcctgacctcaggtgatccacctgcctcggcctcccaaagtgctgggattacaggcattagccactgcgcccgacacctgctctatctcttaagaagcctcccttgccgggcacggtggctcacacctgtaatcccagcactttgggaggccgacgtgggcggatcacaaggtcaggagatcgagaccatcctggctaacacggtgaaacctcatctctgctaaaaatacaaaaaattagccgatcgtggtggcgggcgcctgcagtcccagctattcaggaggctgaggcaggagaatggcgtgaacctgggaggcggagcttgcagcgagccgagatcacgccactgcactccagcctgggtgacagagcgagactccatctcaaaaaaaaaaaaaaagcctccctgttggtggaatacccatatgagggaatatgatgcagcatgtaaggaatgaggcaccgctccattctacaatgtggatgaaccaggaaaacatcgttctgagtgagagaagccagatgcaaatagccacagagtgtgaggtgtcattgatctgaaatgtccagaacaggcaaatcctggccgggcgcagtggctcatgcttgtaatcccagcactttgggaggccgaggtgggtggatcacctgaagtcaggtgttggagaccagcctggccaacatggtgaaaccctgtctctaccaaaaatataaaaagtagccaggtgtggtggcacgtgcctgtaatcccagctacttgggaggctgaggcaggagaatcgcttgaatctgggaggtggagattgcagtgagccgagatcgcgccgctaccctctaccctgggcaacagagcaagacgctgtctcgagaaaaaagaaaaaaaaaaaaatacaagcaaatccatagagacagacagtagattagtggcttccagggatgaggaaggggcaatggggagtgattgctaatggagacagggtttcctgttgggtgatgaaaatattctggaaccagatagtagcgatcgttgcctaagaccgtgaatgtgctcaatcccactgaactgttcactttaaagtgggtaacggctgggcgaggtggctcacacctgtaatcccagcacttttggaagccgaggtgagaggttgcttgaggccaggagttcgacgccagctcaggtgacatagggagaccagtccctacaaaaaataagaaactatcgaggaatggcagtgcttgcctacggtcccagctagctgcggggctgaggcagaagaattgcttgagcctaggacatggaggctgcagtgagctatgatcacaccactgcactccagcctgggtgacacagcgagaccctgtctcaaaaaatggaaataaaatacactggttaaaatggtattttttttttttttttttttttgagatggaatctcgctctgtcacccaggctggagtgcagtggcgcaatctcggctcactgcaagctctgcctcccgggttcacgccattctcctgcctcagcctcccgagtagctgggactacagccgcccgccaccacacccggctaatttttgtatttttagtagagatggggtttcaccttgttagccaggatggtctcgatctcctgacctcgtgatctgcccgcctcggtctcccaaagtgctgggattacaggcgtgagccaccgcgtccggcctaaaatggtaatgtttttgttatgtgtactttgccacagtgaaactgcaacttaactgggtatggtggtgtacacctgtagtcccagctacatggattgggagactgaggcaggaggattgcttgagccaggagttcaagtccagcctgggctacatagcaagaccctgtctctaaacaaacaaaaccagaaacacccccagcaactcagctctcagggtcctgcatctctgtctgtctctgcctggggtgggggtgagggtcaaggtggaggagccagcctctgctctctactctctggtgcccacaggtttgccacgccccaggcttggggggcattgagagattcacaacccctctctggcctcagttagccaatgtgaataagaagggaccttgagggaccgggcgtggtggctcacgccagtaaccccagcactttgggaggccgaagtgggcggatcacttgaggccaggagtttgagaccagcctggccaacatgatgaaaccccgtctctgctaaaaatacaaaaattagctgggcgtgctggtgggctcctgtaatcccaggtacttgggaggctgagggaggagaatcgcttgaatctgggaggtggtggttgcagtgagctgggatcactctactgcacttcagcctgggcaacagagcaagactccatctcagagaaaaaaaaaaaaaaaaaagaagggactttgaggacctgagctagctagccctccatcagcctctccagcatacagttggcaccattcttagtggtggtgcatcgtaggacgtttagcagcttttacccactagatgtcagtagcatcccaccctcaactctgtggcgaccaccaaaaatgtctccaggcagtgacaaaagttcctctgaggccagaatcagtctcagtggagaatccctggtttggtccctatctctacactgcagagtggatttgggatcactaagccactttggcatcaatgatgtcctcattggaccaagctcagccaatcagagcattaattgcttcccctgatgttagtgattggtggaggaatattacatggcccaagctcagcctatcagagtcagccctgagactttagcctgggctactgggacagatagattttcctgcagcgtctagggtattggtaggagaggggcccagaacacatgggggacttttttttttggcactttccaggctgtttatacgcgttctctggctctgtactattgctttggaagatatcacactgcatgatgtcccacatgtgaaagcaaggccaaggactttttttttttttttggctggaaacattttgaaagggattttgtaattattcttttagttctagctagcgatgaatggatgattggttggatgtgcttgggaattcttgctgaatgaggtcacctagcctcaaaaacaatctaaatgggaggtgaatgaattctcaattttacgcttagtgaggctgacataatgttaccttttttttccttttgtaattgttcttgtattttagaatgaggatatcttattccctaggtctttaatatttctgttggcctgtgcaaagactcaaggctccaggcatcgtgtcaaaagtgcttacagatagaggcatctttctcagagagaagcccattcagggaacagcagatgaacaggtgaagtgacaagcatttctgtttcttttttcttttattattattattattatcaacaacatcatttttgagacagagtctcactctgtcacccaggctgtgcaatggcacaatctcggctcactgcaacctccgccccctgggttcaagcgatcctcctgccttcagcctcctgagtagctgggtctacaggcatgaaccaccatgcctggctaatttctttcttttctttcttttttttttttttttagatggcatctcactctgtcgcccaggctggagtgcagtggcatgatcttggctcagtgcaacctctgcctcccaggttcaaacaattctcctgcctcagcctctggagtagctgggattacaggggtatgccacaatgtttggctaatttttgtatacttagtagagatggagtttcaccatgttgcccaggctggtctcaaactccacctcaagtgatccactcgcctcggcctcccaaagtgctgggattacaggtgtgagcaaccacacccggctgagaggcatttctgataacctaatttgagtgcctggatccagccacacctgaagccaacttcccctgacaatttcagatgcacaagtcatccatcccttctcctttttttaaaaaaaaaactacttctggagcatttcattaagtcaaacaacaaaagttatgcagtgttccgtgcacttcacatatataaattcccacagtgagccttaggctcacatctcattaaaaatattttgagggcctggcgtggtggctcagggccgggcgtggtggctcacgcctgtaatcccagcactttgggaggccgaggttggtggatcacctgaggtcaggagatcgtagaccatcctggctaacacggtgaaaccccgtctctactaaaaatacaaaaaattagctgggcgtggtggtgggcacctgtagtcccagctactcaggaggctgaggaagaagagtggcatgaacccaggaggcggagcttgcagtgagccgagatcacaccactgcactccagcctgggcgacagagcgagactccgcatcaaaaaaaatttttttaatatatctttttaaacatttatttatttatttatttatttatttattgagatgaagtttcagtctgtcacccaggctggagtgcagttgcacgatcttggctctctgaaacctccacctctcaggttcaagtgattctcccacctcagtctcccgagtagctgggattacaggcagctgccaccaggcccagctaatttttttgaatttttaatggtggggtgggggggcggtttcagcatattggccaggctggtcttgaactcctaccctcaagtgattcacccactttggcctcccaaagtgctgggattataggcatgagccaccgcgcccggcctaaatatctttttaaatttctattttctgtggtgggactatgaaaaaaaaacagtaatagcaaatcctgtttttcattcagtaggatattttttcttcctgtaaaacagattgtttacagggctggcagggacttatatatgattcagcattgagtccgcagcatcatcaacacatttgtttcaagattaaaaccaaatataaggcgttaggagtctcttgaaagacacttaatgatttcattcctttaccagcccggatggatgaaagaaagttgattgaagaaaagttattacaaatcaggaaggaaggacagtgtgatgcgttccagcatctggggtatccttttttttttttttctcaagccatttttgagctggagattgatatttgtaaccaaaacagctttcactcattccaacctgtaaaatgctatctttttttttttttttttttttttttttgagacggggttttgcccttgttgcccaggctggagtgcagtggcacgatcttggctcactgcaacctctgccccctggttcaagtgattcccctgcctcagcctcctgagtggctgatattataggcgcccaccaccatgcccggctaatttttttgtatttttagtagagatggggtttcaccatgttggccaggctggtatcaaactcctgacctcaggtgatccaccagcctcggcccctcaaagtgctgggattacaggcgtgagccactgcgcctggccaaaatgctatctttagacaccacgcaggccatgaaaatttttgttcaaacaaattataaaactgatgaatcagaagtgttctgatgacagctagcatttgtggagtccctgctggagtcagatgccatccacgggcttttttttttttttttttttaatgagatagggtctcgctgtatcacccaggctggagtgcagtgcagtggggtgatcatggctcactgcagcctcaaccttcgggctcaagtgatcctcccaccttagcctcccgaggagctgggactacaggtgtgtaccaccacaccaagtctatatatagatatataatatataaatataaatatattatataaatatatattaatataaacatataaatataaatatatatttatatatttaataaatatatattatatatatatatagttttttttttttttgtagagatggggttttgttatgttgcccaggctggtctcaaactcctggcctcaagcaatcctcctacctcagtctcccatattgctgggattacagatgtgagctactatgcctggtcctatgggctttcatgaggattaaatctcagaatctcctcaagtgattctgtgaggtaatgacagttattcccattgtactgatgaggaaatcaaggcacagagagactttgcccaaggcaccaaagcaaagaagtgtcagagcctggagttgaactcaaggaggctgtctgcagagttgatcccagttaggggaccattgctgctctctacccagcccagggtcccatgccccacgttctattccagcacacacctgctaaatagacggagatcccacagcagaaaaggccaagggccacatgtctgaggaggcggcagtcgtagagaaaccagtcagacctggaatgaaggggagcaggaagataaagggttcaggaagtggagctggtggggggaggtcagtgaggacagggagggagagccgcttaaatgagacaaggacccagctttcagggacccaaaatctatgtgagtacctaaccatcatccatctacttgcccacccatttacatccatttacttatccactctccatctatccatcaattcatccatcagctcatgtatccatcagcccatccatccatctatccacccatttatccattcatccattcatccatttatccacccattcacccatttgtccactcatccatccatccacccatccatccatatgcccattcatccatccacccacttacccatccatccatccatccatttatccattcatccattcatccacccattcatccatctgtccacttatccatccacccatccatccatccatacttccactcatccatccatccacttatccatccatccattcacttatccatccatcaaaccagtcatccatccactcattcattcatccatccacttatcaattcattcatccatccacttatccatccatcggccccacccattcatccatccatacaatcatttagatatccaccatccactatctgatatctatccatttatctatgctccatccatccacacatccatttttccaagtcagtgtccaccatccatttaccattcatattcattgattatttgaccagcactcatatacagccttccatccatttaaccatgtgctattcatccatccatccattcatttaaacaccctctgctatcctatctatccatccctcacccacccatccactggtcatccatcttccattcactatccatccacccctcatccatccatccatccatctatccatccatccattcatccttccttacttcgatccatccaccatccattctctttcccctataacccatctatatgcatgagtccactcaaacactcaacactcaggatgcagctactatgtgcagatacttgctacacacctggcttccattattttacagactacaagcttctttgagagatgaggaaactgagtttcacatgctgttattgatgatacaaaccgcgaccccaagaggtgagactgattgaggaggaagtggaggctataagagcttccatcctcactcagctcccaccagtataatgaaagtggacgccttccccatcttcctgtcgccttccctcctgtccccttttcagcacagtggctagaggtggtcattcaaaacctaaatcagatcaccttcctccttactcacaaccctccttagcagaagaaatcccaaagtcctatctcctctctatcccatctctctgtttcctttccttctcagcactcattaccatctgctattattattattattagagatgaggtctcactatgttgcccaaactagagtgcagtggttattcataagcatgatcatggctcactgcagccttgacctcctgggctcaagggatcctcttgcctcagcctcttaagtgtatgggactacaggcatgcaccaccacacctagctaattattattttttctttttgtagaggcaaggtcttgctatattacccaggctggtctcaaattcctggcctcccagcactttgggaggccaaggtgggtgggtcatttgaggtcaggagttcaagaccagcctggccaacatggtgaaaccccgcctctactaaaaatacaaaaattagctgggtatggtggtgggcacctgtaatcccagctactcgggaggctaaggtgggagaatcgcttgaacccaagaggtggaggctgcagtgaaccgagatagcgccactgcactccagcctgggtgacagagcaagactctgtctcaaaaaaaaaaaaagaaaaaaaaattcctggcctcaaatgatcctcctgcctctgcctcccaaagggctgggattgcaggtgtgaaccaccatgccttgtccttgttatgtttccttattttctgtgaccccatgagagcaggtctgggtccacttggtccccgctgtctctgatgccctgagccagatccattcccctgcaggcaggcacccaacagatgtttgctgacccgtgggacccatgcatttcattgtcccttgggtggaaggtgcatggtctggataggatctacctcaatggtgggagttctcatctgctcaatttcacagaattctggactagaatttgggctcctctcccccgacattctggagagaaacactaccatgtgggacagcggagtcctcagctcaaggagggttcctccttccacaaccactgcccctgataggggtccctcaatgaccacatccctgactgagttcaggtccctgaggaaggaactcaatttcagaccaggacacaggctctggctggctctacccagaaccaagttcaagtccagcactgtcccgcctcccacccacttccaagccagacagcctgagagctcagcctcccctgtttgagatccaggcaagctgatcctggaccctctttgagcctcagtttcctcatctgcaaaatgcgagacacagcagtggttgcacctgctgcaaaattgaacaaatatagaatggagggagggaaggagggaggaggagaggaaaggagggaggcagagagacatggagtggtggggagagggaagtggggagggaagctgtccccccagcctgaggccaaaagaggggaagaggctcaaccaggctcacccagcccccagccgggcctccgaggcggtgaggccagtcctcctacctcctggggccaggcccccgcgccagctcggcgcccaggtggccacagagcgcggcgagcagcaagcaggtgaaccccagcacgagcaccagcgcggccagcgcggcggccagcggcagcagcgtcccggccgcgtcctctggcagcccggggccggcgcccagctcctggcccagcccctcggcgcgcagcccccgcagctcggcgcggcccgcctgcagctgaaacagcagctgcgcgcccagcgccgccagcacggccgccgcgatgcccagcagggtcattgcagccagcacccggccgccgtaagaacgggccatggcgggggttcctgcgggccgggggaagagttgaggaattgaagtggttttagagggcaggggagttggggggaatccgagggtcctcagggggtccccgagggggcggggccgcagggagtgtctgaaagttcggggactgggctgggggtcgccagacggacgggggctccggggtgctggtcgcagccgggacgccgaatctccgcgaaaacttgggacaaagtcttttctcctccctcccggggccccgcgggcgccccctcttggtccgctgggcctggcggggcggggcctggcaccgggcgcagggcggggaggccccactagggactggatcgcgggaaccccacagctcgctaagttcagaaaagggcaccaccccgccccctgccgccctaagcatcgattgtattgtggtttaaaacaagaaaaaggaggccgggggcggtggctctcgcctgtaatcccagcaccttgggaggccgaggcgggcggatcacaaggtcaagagttccagaccagcctggccaatatggtgaaaccccgtctctactaaaaatacaaaaattagccgggcgtggtggccggagcctgtaatcccagctactcgggaggctgatgcaggagaattgcttgaacccaggaggcggaggtttcagtgagctgagattacgccattgcactgcagcctgggcgacagagcgagactccgtctcaaaattaattaattaattaattaaaaaataaaaaataaagagaaaggaggccgggcgcggtggctctcgcttgtaatctcagcactttaggagtccgaggtgggcggatcacttgaggtcaggagttcaagaccagcctggccaacatggtgaaacccccgtctctactaaaaaaaaaaaaaaaaaaaaaaattagcccggcgtagtggtgcatggcctgtaatcctagctactcgggaggctgaggttggaggaatgcttgaatcagggaggcggaggttgcagtgagccgagattgcaccactgcacactccagcctggctgacagagtaagactccatcaaaaaaaaaaaaaaaaaaaaagagagagagagagaaagggctgggtgaggtggttcacaactgtaatcccagcactttgggaggctgaggcaggaggatggcttaagcccaggagtttgagaccagcctgggcaacatagccagaccccatctctacaaaaaataaggaagtcagcctggtgtggtggtgcacgcctgtggacccagctactttcgggactgagacaggaggatcgcttgagcccaggaggtcgaggctgcagtgaactgagatcacgccactgcactccagcctgagtgacagagcgaggctgtgtctcaaaaaagaaataacaaaatttaaaaattcacttttcatttgatctcaacccagggactctgtcattggctgtgatttcccctctgcttacttccttcaagcctttgggtaaccgttgcttcctctaggaggctagggagaatcctggatcccttccccaactggtcccccaaattattcgcacagcactttaaaaaaatcgagatgaaacttacataacataaaattaatcattttattcagtggcatttagtgttgtacaatcattacctctgtctagctccagaagattttcatccccccaaaaggagaccccatccccattaccagccactccccattccccctcctcaagtggctcacaaccattaatctacttcttgtctctgtcgatttgcctgttctggacacttcatatcaatggagtcatacaagaggtggcattctggcttctctcactctgcatgatgtactcaaggttcatcgaggttgtagcatggatcagtgcctcattcctttttatggctgcgtaatattccatagcgtgtctggaacacattgtgttcatccgttcatccattgatgggtatttgtgttgttggttccttttggtgaaggtgactaatgctgctataaacatgtgtgcacaggtatcttcttgagtcactgctgtcaattcttgtggggcgtggactcctaggagtggagttgctgagtcacatagttactctattttaactctttgtggaaccctcaaacttttccacagcagctgcaccgttttccatttccaccagcaatgtctgaggtttttaaaaataattttctgcacatcctccccaacacgtgtttcctcctgccctcctcctcctcctcttccttctcctcctcctcctcccttccttctcctcctcctcctttcttcctcctcctcgtctcctcctcctccttcttctttttttttttatcagggccttgctctgtcacccaggctggattgcagtggtgtgatcatagctcattacagccttgacctcctgctcaagtgatctttctgcctcagcctctccccaagtagctgggaccacaggcaagcatcagcatgcctggctaatttttaagtttttttttttttttcatagagatggggtcttgttatgttggtctggtctcaaactctttatacccaagtgattctctcacctcagtccccctaaatgctgggattacaggagtgagccaccacacccagcctcctccttcctcataatagcctttttttttttttttttttttgagatgaactctcactctgttgcccagactggagtgcagtggtgagatctcggctcactgcaacctccacctcccgggttcaagcgattcttgcacctcagcttcccaagtagcaggattacaggtgcctaccaccacactcagctaatttttgtatttttagtagaaacagggtttcaccatgttggccaggctggtctcaaactcctgcctcaagtgatcctcccacctcggcctcccagagtgttggaattacaggtgtgagccaccatacccagccagtttttaaaatttttttgtagagatggggtcttgctatgttggtcttgtctcaaacttcttatgcccaagtgatcctctcacctcagcctcctgaagtgctgggggattacagagtgagccaccacacccagcctcctcctccctgataatagtcattctgatgcttataaagtaatatctcattgtggtttttatttgcatttccctaataactaatgatgttaagcatcttttcatgggctttttggctgttcatatatcttctttggagaaatgtctattcaaatcctttctctattttaaattaattaattaatttttttgtagcgatggggtcttactatgttgtccaggctcatctggaactcttaagctcaactgatccacccactgggcctcccaaagtgctgggattacaggcatgagccactgcgcctggactggaatcaagtttttttttcaggtttgaaaattttggggccccttgaaaagagtttgtgggccctgtgccctcagcctcgtaggtaaaatggccccaaggaagagtatggggtgagggtgacccttcacttccaggtggcctccttctttgctgtgtgactttgggcacatcccttaacctctctgggcctcttcatatgtagcaagaacctgttccttctttcaattgattgatcgattgattgattcattcactcattcatcaggcctcagcccaacactcattctttcatcatcatcagtgttagggtgaattttccatgttttccaggtaaggaaaagtctcacgttgagggctcagcaattcatttggatcagggctacagtttgctctgggtggtgggaatacagagatacaagatattttcatgtattcattcgacgaacatcagtggagagcccatctacgtgctgggctctgaggacccaggggtgaccaagacaggcccagctctcccttctggtgctcacagcctggtgggggaggtggaaacatacatgaaaccccacaataaggggacacttacctaaatggccaacattcattgcagtgctggcttaggttttgccattatttgttggggttgggggaacacagataccaaggtctggtcctgctgtttgtatgtggggtgattctctagtttgggggtgtctggcttcaacttggaaagttaaccctgcaagcaggccccacactgctcttggtagatggtgagctcatctaccttggccttttgctaagctgcccttctcattccagctcagacaggtggggagtggggaggtggggatggggggtgaggcttggagagttccaccatacagtccaaggcacacagcctgacagggacagagagtggactccctcaacctcactgcccagatacggatggctggtcactgcatgttggctggaataatagtaacaatgttgacaggttacatcgcctgtgatttgttggaaaagggcaacctggtatgatttacagataatttaagtgatttttatttttttgagacagagtctccctgtgtcgcccaggctggagtgcaggggtgcaatcttggcagactgcaacctccgcctcccaggttcaagtgattctcatgcctcagcctcctgagtagctgggactacaggtgcgtgccaccacgccagctaatttatatatatatatatatatatatatattttttttttttttttagtagagacggggttttgtgacagtggccaggctggtcttgaactcctgacctcaggtgatccacttgcctcggcctcccaaagtgttgggattacaggagtgagccaccacgcccagactcaatgcacccatttcacagatgcgccacagcagtccagagagggctgctggaacatgaagcatcaggcagcaccagggtcctgagctgggtcaattttccaacctggaggttggaagtcgaggtgagcatgaaatcaggtggtcatccagtattcaggaccctctggcctcccaggcccccagcctccttcttcctgtcagccagattcccgtgcaccgcagtcacgcttgctagtttccatggacacgcgtggactcctaggaaaccttttccggagactgggcacgagaggagtgatttgcatctcatttgaatgctaggccctgccccgaaagtgtgccatctcgtcctgccgcgagggggcgccagaggccaaccaagcagttcgtgagccgagtgagcacctgctcctccttcttcactgacctgcctgggagaacctggctttaattctaatttttcagaggaagggattagtgtttagagaagggagttgatctcacggtcacaaagccaggagatggttctagatcggagtttttgatttctgtattctgccgtgttccctggtaatgccccagtccacgagcaacagagggagacctgggagactcttggctcctgctggcagcccgggacccccagcccacgtggtatcaaatattgaaatgcatccgtgtaacatataaatctgttgttaaaggattgttgtgattttgcgcatgaaatatgtgggcaactcggccggacgcgatggctcacgcctgtaatcccagcactttgggaggccgaggcaggcagatcacctgagatcgggagttcgagaccagcctgaccaacatgaagaaactccgtctctactaaaaatacaaaaattagtcaggtgtggtggtatgcctgtaatcccagctacttgggaggctgaggcaggagaatcgcttcaacccgggaggcagaggttgcggtgagccgagatcgtgccattgcactccagcctgggcaacaagagccaaactccgtctcaaaaaaaaaaaaagggggggggcaactcatttaatgtaggatgggcttggcgttttcagcacgtttgttctattttagtttagattttctcatttttggagccattaattactccccctcagccaggtctcagaaatatttatagagatccttgaaaagctctccctactttatctcctggccagggaggctcagatgcgcacctggaagaccagaacagatccctgggtgtgaggggatgtctcagaagagagaatcccctgccactcgctccatcctagctcccacccttccctgcatggggatcagaacagactccccaggtcctgtcctgcttctccctgtggatcttattacactccctctgccctgacccctcctggggatgggctcaaaacagacatcacccctacccatccccacttcgcctccacccctcttcatcatgggagctcagaacagccccccagcccctcctgcccccagaggagtgctcagaacccagacagtcccctacctcgtgctcccacagtgagctccgtcccgccctactcctgcgcagatctctgacaatcccctcccctcccctctcctcggcttccaagaggctcattacagattcccctcccgcggcctgcccacctggggcagaggaggactcagaacagccttccgacttccatccagccctctctctccgcagtggggggcaggcttttcatagaccggtcacccctccaccagtcttccccaactatggagtcagaacagcccccctcggccccaccctccgccttggcaacccccccccaaccctccgccggggcacccccaccccacatccctcccccactccctcccagctctccacctccggagtggaggggttcatcaccaaaccccaactcctccaccctagggggtcataacatccgcccttggccctgccctccgccctggcacccccacccccccacccccatcccgctctcttacgggggcggggcggggaaggagggtttccttttgtgtttttggggacagggtctccctctgtcgctcaggttggagtgcagtgtgcaagtggtgcgatcacggttcgctgcagccttgacctcccggactcaatccattctcccacctcagccttcagggtagctaagccacaggtgcgcgccaccacaccgggctaacttttaattttcgtagagtcagggtctcactctcttgcccaggttgatctcgaacctctgggctcaagcgatcctcccgccttggcctccccaagtgctgggattacaggcgtgcgggggtggggtgggggtggaggttcatcaacaaaccccactcctctcctccaccctagcgggtcagaacagccccccggccccgccctcctccccaccccctcccccggggtcgcgcccgcctcgcgccgccttttccacgcggtacttgtggcggcgcaggcactcggtgaggctccgtggctcctggtcctccaggtcctctggcagctggaagttgcggtccagcacctcggccgcctcctgccagttggcgaagcaggcggtgcccaggcgctggatctcgtcggcgccgtcgcgagtgagcacgtccccgtccggcttgagcaccacgaccgccggcaggcgctccactgagaactggcgcccgaggtccctgcggagcgggcaggtcagtctggacggatccacatccctgatgctgaaccagagagccccacatccctcctcccagtacttaggcagcgccttctgtgtgcactgcctcttgccgggcactgggtaggtgcacacgaggaccgggacagggccagacactttggtccccgcgctttgtctccagcaccccaggcatgctccaacctcggggcatttgtgctggctgtgcccacgtctggagcgctctcctcagacatttgcaggctaagaccctgtagtatggagacctcacatcgcaagacacaaggtcttactacatttatttgtagtaagaccctgtctctacaaataaataaataaataaataaataaataaataaagcagggtgtggtggtgcgctcctgtagtcccaggtactcaggaggccgaggtacctgggacttccctcgagaagtatcccttgagcccaggatttcgaggctgcagtgagctatgattgcaccactacactccagcctgggtgacacagccagatcctgtctcgaaaatagaataaataacattccaaggcagtgtttttctccaaagtgcctttcagcacccaacatcatgtatggtttttaaaatttctcctgcttggccggcgtggtggctcatgcctgtaatctcagcactttgggaggctgagataggcggatcaccggaggccaggagttcgagaccagcctagccaacatggttaacagttcttaatttcagcctgctgcattcttccgtggcccttttccaggctgccacaaagagaacccatgatacttacaaaatcccatgagtagattgccaggtttagtaattaaaaatataagacactcacaggagatcgagaccatcctggctaacacggtgaaaccccgtctctactaaaaaatacaaaaaattagccgggtgtggtggcaggcgcctgtagtcccagctactcggagaggctgaggcaggagaatggcgtgaacccggaaggcagagcttgcagtgagcccagatcacgccactgcactccagcctgggcgaagatactccatctcaacaacaacaacaacaacaaacaacatatatatatgacactccctctcttaaaaaaaaaaaaaaaattggaggctgggtacagtggctcacccctgtaatcccagcactttgggaggccgaggtgggaggattgcttgagcccaacggtttgagaccagcttcagcaacataacgagaccccatctctctctattctatatataaatacactagttaaatttgaatttcagataaacaatgaataatcttttagtgtaagtatagccaaatgcatgggacatacttatactaaagaaagattattcattgtttatctcaatttttttttctttttcttttttttagagacagagcctccatctgtcacccaggctagagtgcagtggcgggaacacagatcgtggtaacttcaaactcctgggctccagtgatcctatagcgtcagcctcctaagtagctgggactacaggctcgtaccaccacacctaatttttttttttaagtttttgtaaagatatggtcttgctatgttgcccaggctggttttgaactcctggcctcaactgatccttccatctctgcctcccaaagcactgggattacaggcatgaaccactgcacccagcctgaaatttcatttaactggacatcccgtctacgggggatgtggaatgggaactgcccagataacatactagtctgggtgaatgttttgttgagaggaccctgtctcagagaaggtcagcatttgtctgcagctggcgtctctgccccagggaaggaagcgttgctagcgtcagggaggaatctcctcagctgccgagggcagtgggcaggattcagtgtccaaactctgatgatgtccaaattctgatgatgaccagaaacttccaacttgttgagtaacaaaaggcatgacattgggaaaatgtcatgaagtctgcaactcactttcaaataatttagcacaaactatacacgtatgcatatacgtgtatatagacacgtatttttattgtagacaaagtgtatatgtgtctatagacacgtatttgtattgtagacaaagtgaatatggcaaaatgttaacaattgcgatgggtttcattgtacacttctttcaactttttgctatgtttgaacattttttttctttctttctttttctttctttctttttttttttttttttgtgacatagtctcgctctgtcgcccaggctggagtgcagtggcacgatctcgggtcactgcaagctccacctcccgggttcacaccattctcttgcctcagcctctccgagtagctgggactacaggcgcccgccaccacgcccggctaatttattgtatttttagtagagacggggtttcaccctggtttcgatctcctgacctcgtgatccgcccgcctcggcctctcaaagtgctaggattacaagcgtgagccactgcacccagcctgaacgtttttttcataataaaaagtcaagctataatactgtttcattgggcagctccttttgtaaatttttttaaaggatctttttaatttttttttttttttttttttttgagacagagtcttgctctgtcgctcagcctggagtgcagtggtgcgatcttggctcactgcaccctccgcctcccgggttcaagcgattctcgtgcttcagcctcctgagtagctgggactacaggtacccaacactacgtctggctaatttttgtatttttagtagagacggggtttcaccatgttggccaggttggtcttgaactcctgacctcacgtgatccacccacctcggcctcccaaagtgtgctgggattacaggcatgagccaccgcaccaagccacctttcataatttttcttttttataattttagagatgggagtggtggtgtcttgctgtgttgcccaagctggtcttcaactcccagcctcaagcaatcctcctgcctcagcctccaaaagtgctgggattgcaggtgtcagccaccatgcctggctggacatctccttataaagcttgaatccgactacctctccctctgttctaatgtccaccatggctccctgctactctgaggatcatgtctatacttgttaaggtggctctgcaccacagacctgtcacatctaaagaagattatgacaaatgcgtgggcagtaacaataacattgtaaatttgatcctctccggaattacctacagtctccctgaactggttgttctttctctgacagcctccaagcctttctgctgtgccctctgcctggaaccccttccctttcctcattctccatcctcctatctttcttctcattggagtctccctgtaatttatttatttattacattttttattttttatttttatttttgagacagagtctcactctgttgcccaggctggagtgcagtggcaccatctcggatcactgcaactttcgcctcctggattcaagcaattctcctgcctcagcctcgcaagtagctgggaccacagctgtgcgccaccaggcctggctaatttttgtatttttagtagagacagggttttgccatattggtcaggctagtctcgaactcctgacctcaggtgatctgctcaccttggcctcccaaagtgctagatttacaggtgtgagccaccgtacctggccttacttttttaagagacagggtctacctgtattgccctggctggagtgcagtggtgcgatcatagctcactgcagcctcaaactctaggctccagttatcctcttaccatagcctcccaggtggctaggactacaggcatgagccaccgtgcccagctaggggtctctctttaaagccactttttcggggaagcatcctctgaccccggaacctcaccaaggtttccctcattgtatttccactttgtggcctagctttgtcctctgagcactactgcaattcgctattatatatttgttttttgattttttagacagagtctccctctgtcacccaggctggagggcagtggcacgatcttacctcactgcagcatctgcctcccagtttcaaacgattctcctgcctcagcctcccaagcagctgggattacaggcgcccaccaccacgcctggataatttttgtatttttagtagagacagggtttcactatgttgaccaggcttgtctcaaactcccgacctcaggtgatctgcccacctcggcctgccaaagtcctgggattacagggttaagccaccatgcccggccttgctattacatagttgattctgtcttttgcatctgttcctctcactcggctctaagctccctggggtggcatggaagccagcatgtggaagtgggcacccctgtctgtaccccctagttcccagtatatggactggcacacaggggctgctcattcactctagttagaatggatgcttcactttcagcgaacatgccccctcctccaggaagccctccctgcccctcctcacctcctcagatcatcctcaaagggcaggaaaagccatttctttggcatgtccttgaggaacaggtcctgctgctcctccgtggagtcctgggacacgtacaccagggccagctgagccgcccgcagtacatagaactcatctgtgagccgcacgaagaagtccttgaggatgggcacgaaggcctggcactgtggacaagccccagcaccaaagaacagcagcaccagccggttctccagcctgcgactgacctcagcctccgtatccagctcgtcctggtcgctattgttgcggatcaggatgcggccagagaacagggaggccatggtaacctgggttgggtgctggggacagcgcggcgtgtggtccccggtctgctgactggctcctctcccagaaatagaaatctttagaaaaccagcttaggacttcactaatctgcctaaaccttgacctgaggggcctctaagggcggggggcagggctctctgtgtggcccttctcaggagagagccgcaaacgcattaagaaaacacgtaacagatgggcacggtggctcacgcctgtgatcccagcactttgagaggcagaggtgggaggatcatctgaggtcaggagtttgagaccagcctggccaacatggtgaaaccctgtctgtactaaaaaataaaaaaattagccaggcgtggtggtgggcacctgtaatcccagctacttgggcagccgaggcaggagaatcgcttgaagccaggaggcggaggttgcagtgagctgagattgtgccactgcactccagcctgggcgacagagcgagactccatctcagaaaaaaaaagaaagaaagaaagaaaaaaaaccaaaaaaccatgtagcagacagtgactcacgcctgtaatctcagcactttgggaggctgaggcaggaggatcacctgagaccaggagtttgagagcagcttgggcaacagtgtgagaccccatctctatgaaaaaattaaaaacttagctgggcatggtgttgtcatgagcctgtagtcccagctactcagctgagatggaaggatcacttgagcctgggaggttgaggctacaatgactgcactactgcactccatcctgggtgacagagcaagacctagtgtctaaaaataaaaaataggctgggcacggtggctcacgcctgtaatcccaaagctttgggaggtcaaggtgggtggatcacctgaagtcaggagttcgagaccagtctggccaacatggagaaaccccatctctactaaaaatgcaaaaattggccaggtgtggtggctcacgcctgtaatcccagcactttgggaggctgaggcaggtggatcacaaggtcaggagatcgagaccatcctgactaacacagtgaaaccccgtctctactaaaagtacaaaaaaaattagccgggtgtggtggcgggcacctgtagtcccagctactcgggaggctgaggcaggagaatggcgtgaacccgggaggtggagcttgcagtgagccgagaccgcgccactgcactccagcctgggtgacagagtgagattccgtctcaaaaaaaaaaaaaaagcaaaaattagaccgggtgtggtggctcatgcctgtaatcccagcgctttgggaggctgaggcaggcggatcacctgaggtcaggagttcgaaaccagcctggccaacatggtgaaaccccatctctactgaaaatacaaaaattagcggctcgtgatggcacatgcctgtaatcccagctactcgggaggctaaggcaggagaactgcttgagcctgggaggcagaggttgcagtgagctgagattgcaccactgcactccatccagcctgggcaacagagcgagactacatctcaaaaaaaaaaaagcaaaaattagccaggcgtggtggtgcatgcctgtaatcccagctacttgggaggctgagggaggagaattgcttgaacccaagaggcggaggctgcagtgagacaagattgtcccactgcactccaacctgggggatagagtgagactctgtctccaaaataaaaataaaaaaatttaatatctgacttttttgtatgtatattttttgagactgggtctcactctgtcaaggtgcccaggctggagtgcagtggtgtgatcatggctcactgcagccttgacctccagggctcgggcgatccttctatttcagcgtccctgttagctggcactagagttctgtgccaccacgtctggctaattttttgtatttttagtagagatgaggttttgccatgttgcccaggctggcctccaagtcctgggctcaagcaatcctccagcctcggcctcccaaagtgctgggattacaggcatgagcatgcaactggccacaccttttcataaatatattaaatcacattgattcacatggactctactagttacttcaaggtctaagtcagggtgagcatctgtgatattttagggtgtctcctatgatcaggatgtgatatgaaattatctttgatttccacaggggacaaagttccagggctagccaatgtctgcattcacagtgagaggacctgatgaattccagttagaggctaatgaaatgggccgggcacagtggctcacacctgtaatcccagcaatttgggaggccgaggcgggaggatcacctaaagtcaggagttcaagaccagcctggccaacatataatgaaaccacatctccactaaaaaaatacaaaaattagctgggtgtggtagcgcactcctgtaatcctaggtactcaggaggctgaggcaggagaatcgcttaaacccgggaggcagaggttgcagtgagctgagatcacgccactgcactccagcctgggttacagagtcagactctgtctctaaaaaaacaaaacaaaacaaaatggggggactgggcgcggtggctcatgcctgtaatcccagcactttgggaggccaaggcaggcgcatcacgaggtcaggagatcgagaccatcctggctaacatggtgaaaccctgtctctactaaaaatacaaaaaaaaaatagccgggcatggtggcgggcacctgtagtcccagctactggggaggctgaggcaggagaatggcatgaacccgggaagcggagcttgcagtgagccaagatcgcgcctctgtactccaggctgggcgacagagtgagactccatctcaaatgaaaggaagaagaagaagaagaagaagaagaaggagaaggagaaggagaaggagaaggagaaggagaaggagaaggagaaggagaaggagaaggagaaggagaaggagaaggagaaggagaaggagaaggagaaggagaaggagaagaagaagaaaagaagaagaagaaaagaagaagaagaagaagaagaaagaagaagaagaaaatgtatttttttttctccatcctcctgaattctgtctggaccacccacaccttaagattgtagatgtgtaggtgtagaaggctgaaagtcatggatattatattttgcatctccaactccaaccctgtcaaagggtagagactagttctgcccccccttgaatccaggtaggtttcatgacttgctttgacgtatcaaatgtggtggaatgggctaagcgcggtggttcagcctgtaatcccagcacttttgcaggctgaggcaggcggatcacttgaggtcaggagttcgagaccagcctagacaacaatggtgaaaccctgtctctactaaaaatacaaaaattagctgggcatggtggcaggtgcctgtaatcccagctactcaggaggctgaggtgggagaattgcttgaattcgggaggcggagattgcagtgagctgcgatcgtgccattgcactccagcctgggagacagagcacgactccgtctcaaaaataaataaataaaatagaatgtggtgaaatgtgtgagtttcaaagatgtcttcattttattttatttttcagagacggggtctcaatctatcattcaggctgaagttcagtggtacaatcatagcttactgtagtcttgacctcctggactcatgggatcctcctgcctcagcctcctgagtagatgggactacaggtgcatgccagcatgcccgtctagttttaaatttttttgtagaggtcgggtctcactcttttgcccatgctgatctggaactcctggtcttaagcgatactcccgccttagcctctcaaagtgctgggattacagctgtaatgtgcctggcctgaagagtatctttagtttccttctgcctctcattttactcttgaaactctattgggaccccatgtaagaaagctgatctaggcagggcaaatttgctcatacctgtaatcccagcactttgggaagctgaggcgatcagatctcttgatcccaggagttcaagagtagcctgggcaacatagcaaaaccccctctacaaaaaaatacaaaaattatctgggcatggtggtgcacctgtagtcccagctacttgagggtgctgaggctggaggatgacttgagcctgggaggtcagggatgccgggaactgagatgatgcctctgtactccagcccccaggcaatagagtgagaccctgtctaaataaataaataaataaataaatgcaagcagatctaggtatggcacagtggctcatgctcatgcttgtaatcgcagcaatttggcaggccaaggcaggaagatagcttgaccccaggagttcaagaccagcctaggcaatgtggcaaaaccctgtctctacaaaaattagccaggtgtggtggcacacgcctgtggttccaggtactcgagaggctggggtgggagcctctccctcctgagcccaggaggtcaaggctgcagtgagctgggatcgtgccactgcactccaaccttggccacagactgagaccctgtctcaacaataaaaaggaaacaaggggcggggcgcggtagctcatgcctgtaatcccagcactttgggaggccaaggcaggtggatcatgaggtcaagagatcaagaccatcctggccaacatggtgaaaccctgtctctactaaaaatacaaaaattagctgggcatggtggcacatgcctgtagtcccagctacttgggaggctgaggcaggagaatcgcttgaacccggcaggaggaggttgcaatgagccaagatcacgccactgcactccagcctggcgacagagtgagactctgtctcaaaaaaaaagaaaaagaaagaaagaaaagaaagaaagagaaggaaggaaggagggaaggaagatagaaagacaaaagaaagaaagagagagagagaaagaaagaaagaaagaaagaaagaagctctagtccagggctctgtgcctcttgtctgtagaggactaggaggtaaacactttcatctttgaagtccatgtggcctctgttgagaaccatagctctcatctttcctccttctgtagtgggttgaactacaggctccccacaaaaagatatatccatgccttcgcccccggaacctgttaatgggaccttgtttggaaggagtctttgcaggtgttacttagttaaggatcttgagatgacatcatcctggattatctgagtgggccctaaatccaatgactgatgttgtaaacgggagcgtgaccgctgaagcacagcatcacaggggcacgtttaggcctctggatggctgcgggcgggcctgactaatgtcaggccttccacaagaggtggtggagcagagtcttctctaactcccctggggaaagggagactccctttccaggtcggctaagtaatgggtgccttcccaggcgctggcgttaccgctagaccagggagccctctagtggccctgttcgggcatgacagagggctcacacttgtcttctggtgacttctcactgtgtcccttcagctcctacctctgtatggcctggtttttcctaggttataattgtagaacagagattattttaatattggaataaagagtaatgctacaaactaacgaatgattaataatattcatatataatcatatctatattctatttcttgtataactattcttattctatatattttgtttattatactggaacagtttgtgccctcggtctcttgcctcggcacctgggtggcttgccgcccacagaggtgatcagtccaagactacctggctagaaacgagcagagagcagtttggcccggaagcctgagttttactccctggtccacatctcagtttcctggggataggacagtccccaatccctcatctgaaatccctggggacagctgtgtttgtgaattgggagattttgtattttaggaaaacaactgggggcagaggctgctgtatacccgtgctgttttagggggctcagaaaataatacccaggccgggctcagtggctcatgcctgtaatcccagcactttgggaggccgaggtgggggatcacttgaggtcaggagtttgagaccagcctggccaacatggcaaaaccccatctctactaaaaatacaaaaattagccaggcacggttgtgtgcatctgtaatcccagctactcgggaggctgaggcaggagaatctcttgaacccgggaggcaaaagtcgcagtgagctgagattgggcaactgcactccagcctgggtgacagagcaagactccgactgaaaaaaagaaagagagagagaaagagagagagagagagagagagagagagagagagagagagagacagacagacagacagaaagaaagaaagaaagaaaaaaaacaccccaaaatgaagatctcagaagcaaaagtttttctctgaccttctcctgccctcttgtgtctcagatctattctcccccaaggctggccataaaaactagaatccctctttcccaaggtaggttttagaaactagaactcttggctgggtgtggtgcctcacgtctgtaatcccagcactttgggaggccaaggcaggcggatcgcttgagatcagaagttcgtgaccagcctggtcaacatggtgaaaccctgtctctaccaaaaatacataattagctaggcttggtggcatgcgcctgtaatcccagctcctggggaggctgaggcaggaatcgcgtggacccaggaggcggaggttgcagtgagccaagattgagacattgcactccagcctgtgtgacagagtaagattccatctcaaaacaaacaaacaaactggtaagatggagggggaaaagggaggataggaaaaaaggaaggggggaagagaggaggagggcagggaggaggagagaaaagggcagaaaggagagaaggagggagaaagagagaaggaggaagtggggtaagagaagagagaatcagagcacaagaaaggtggaggggaagtttagagaagaaaaaggaggaggaggggtaagaagagaggaaggaggagggaaaggaggagaggaggggaggagggacagggaacactcagctgacatttatgaatgaatgaatctcaattccaagtaagcatgacagctccagtcctcagtttctttcttccttctttctttgtttctttcttttctttctttctttctctcttctatttttttttttttaagacagggtcttgctttgtcacccaggctggagtatagtgacgcgatctcggctcactggatcctctgccttccgggttcaagtgattctgctccctcagcctccggagtagctgggattacaggtgtgctccaccatgcctgactaatttttgtatttttagtagagacggggtttcgtcatgttggtcaggctggtttcgaacttctggcctcaagtgatccacccaactcggcctcccaaaatgctgggattacaggcgtgagtcaccacgcccagcctgccctcagtttctttacctgtcaaatggggtgatcacagcggtgctacctggctaggtaagagtgcaactgcagttactggtcattgctgactcttccaggcccagaaagcagcaggccagtggctggctctgggcctgtcctccggatcttcctcgtgatccctcattccagccaccctgctgcccgcagggaccaatggcagcgtagggggtgagtgcctgcccagccctgtcctccaaatgcattggaatcaggcccgggccgcctcctaaggagaacgctggaaaggtcggccaaggagagcagaaaacaagcagtggtggagtcggcagtggggcagaggagggggagctggaagggaaggaccccaaagcagaagcccgcacagtaggcacagcgcacccaagaagggtccaggagtctgcagaaacagaaaggtccccggcctcagcctcctagtccctgcctgcctcctgcctgagcttctgggagactgaaggcacggcttgcagcttcaggtcagccagagaatggggttgtgcgtgcccccaggccagcgctggcagcgcctgggggagcatctaggaccccggggtgcaagtaaagggcctgtaggtgcttctaggaaggatggggacctggcgtgtggattttgtcctccctgggatcctggggtgtgacggtgagacttaaccgacaaggcttcgggacatggattaagaattagctgtgtccttgaatcacacgtgttaagaccgcggcggtgtttacagttagagacttctgaggccccaatggtgtgagttgagcactcccccgggccctggaacgtgtttttaagaccgaaagaggctttggggcttggatttaggacaagctggagcaagaatacagcccgcgcgggccgtgggtgtggactgggatatttttggtcccccggggtagagatcctgcacgccaactagggctcgggtcctgatatcttgcgagccacgccccaaggctgcaggacacgtgtgtttcctaaaaggagagggggtggggcaaggcttggttgtcatggagacagcggacgaccctggcgggccgttctagcacccatgtctctttggccgtcgcctctccggtccggttgcctctctatggtcgtggcttctggaagacggccggcctcggctctgcgggctgaggggcttcgaagtagacaggagggaagaggggcggggcctaggtcctaggggggccggagtgaaacccaggaggtggcgaccgagccaaagcctgagggcggggcccgtggccaggatagaacctgagcctgggaacttgggctaggcccggaactggggtggggcttgaacggattggggagggctctagtttcgggagggtggggcgtgtgcttattgcgggggggtggggaggcatatgtctaacctagggggtggggcctggctgagaggggcgggactcggggagagggcttgtacctgtgggctgggctagaagcataacctaagggcggggcccagtgagtggtgaaaaggccacggggtagaggcaggaccaggaggaaaggggacaggacgtgaagggtaattcggggatcgaggatagaggctagatgaaggcatgtggcgaggcctgacagtgaccgacaaggtggacatgctggctctgggggcggggactgttgtaagattggcagggaaggatgggctcaaaaatatggaatagagcggacccagggtccgggggcggagcctggccaggacctggccaatcccaggcctggggccctggtctggttcctagttagcgggcgggtgtaaaagcctggaaaggggcgatgcctggcctgaggagttgaccaatcccaggcctgggggcggagtctgactcggagcgcgttcccggactcgcggggggcgcagagccgaggcctgggggcgcggctcgctgtagaggcgggggcggtcgtggggcggagcgggtcgtggggcggggctggagcggcccgcggcctcagctctctctgcttccccaggatgcgggctccgggtgcgggcgcggcctcggtggtctcgctggcgctgttgtggctgctggggctgccgtggacctggagcgcggcagcggcgctcggcgtgtacgtgggcagcggcggctggcgcttcctgcgcatcgtctgcaagaccgcgaggcgagacctcttgtgagtgttgccgggatccgtccagggctgggggcggggctgagggctctgggggcgcacggtgcagggctgggttgcggggacggcttggagggtccggagagctgagggtgctttgtaggttgggggcggggctgggccgagggctgggcgggggcggggcctgagagggtgaccagttgggggtctctgagggggctacaggggacactttaaggatttctcgaggaagatgagtagcctctaaggtgcttcgggcgttgcaggctgcttaggagatgatctcaggggatttggggggcaatttgggggtctttgggcaactggtggaaattccagggagctggggctgactggaaatccgtggcggtgtgggggtctttttggagccgtgataactgtgagagacttcagggggctctccagtaggtcaccggggctcacagggacgacccaatagatagtctctggggggttgccaagacactttgggtctatctagggctttctctgagggatgagcgagctgctctataaaggacttcccgggtttctgaaggtgtgagtttcctcgggatcgtttacagctggggcactgtttgagattttggggtctgtgtgggactttgggtttgggagttgttcggagtgtgtcgggaggctgctgtgtattccaggacttgtttggggggtctcttctggagactgggacactggattcatgctaggggggcagattctggtgtcctgtgcaaggatccttggagggtttttgcggtgtctctgagggacttgctcaaacgagccgttgggggtccttctgggatgaaacaggcattgctgggggcttctatcagagcagacctcaggaacagcaccacgtgggagcaggtgagcgccggctagcggggcagggctcaacaccttcacagctccttgtaagatggagtagcaagagggactgaacccattgtaaggagggcacagagggtgtggagatgggaaagatcccaccgtaagttgactggttctgaactttctaaaactcaccccttctgcatgccatggccccctgcccccggctccttggttgttctgatgtggaaatctgactgtgccctctgctcagacaccttccatggccagcccatccttggcagaaggaagactcagcccctagctgggcactcaaggtcctaccatctgttccctgcccacctgccactccccccatccatatgttcacctggtcttcagaaagacttgcagtgtcaagctcaagctgcccagaacatactggaccccttttagccagggcaggctctccctctgggaacctttgctgaattttcctgctcagcaccctcccatagctccttgttgcccttagaattgacgccatactggccgggagcggtggctcacgcctgtaatcccagcactttgggaggccgaggcaggcagatcacgaggtcaggagatcaaaaccatcctggctaacacggtgaaaccccgtttctaataaaaatacaaaaaaattagccaggcgtggtggtggacgcctgtagtcccagctactcgggaggctgaggcaggagaatggtgtgaaccccggaggcggagcttgcagtgagcggagatcatgccactgcagtccagcttgggcgacagagtgagactccgtctcaaaaaaaaaaaaaaaaatagaattagaattgaggccatactcctgagcattgcgcacgaggtccctgaccatgtcccagcctccgcttacttcccttttgtcgcctagctgcacttaccttttgtctattgctcatttgtttgtttgtttgaggcagagtctcactccgtcgcccaggctggagtgcagtggtgcgatcttggctcactgcaacctctgcctcccaggttcaagtgattctcctgcgtcagcctcccaagtagctgggactacaggcacgtgccaccatgcccagctaatttttgtaattttagtagagatggggtttcaccgtattaaccaggctggtctcaaactcctgacatcacgtagtccgcctgccttggcctcctaaagtgctgggattacaggcatgagccaccatgcctggctcccttttttttgagacagggtgtcttctctgttgcccagggtggaccagcctccatctcctgggctcaagcaatcctcccacctcagcctcctgactagctgggactacaaacgcctgcctccgctcctggatagttaatagaatgttttttatagagatgaggtctcgctatattgcccagtctggtctggaactcctggctttaagcgatcctcctacctcagcctcccaagtggctgggatgacaggtgcacaccaccacacctggctaatttttttattttttgtagagacgtggttctgccacgttgcccaggctagtctcgaactcctggcctccagcgatcacccaatttcagcctcccaaagtgctgggattaccgcgcccagcgtgaactgctttgaaccatattgtctacttgactttcagacagccagatggtgcagttggagttgcaaactcatgtgaggttatgagtcatcgatcgagatttcaccccttcctcctaacagcaaggtctgagataccaaatttccttttagctcctggtgtgtgtatgttaaggaaagatcttattttgatttccaattcacctttatgttgaatgggcatgctttgaggtcttatcagactcaaacctgcttgtctgacacctaagctgtccccctcctggggctacaatgacattttggcctctggttggtccttattttctgatcaccttgttgctacattaataaaaaattaactcggctgggcgcggtggctcacacctgtaatcccagcactttgggaggccgaagcgggtggatcacctgaggtcaggagtttgagaccagcctggccaacgtggcgaagccttgtctctactgaaaatacaaaaattagccgggcgtggtggtgcacgcctgtaatctcagctacttgggagtctgaggcaagacaatcacttgaacctgggaggtggaggttgcagtgagccaagatcgtgccattacactccagactgggcaacatgagcgaaactccatctcaaaaaacaaaacaaaacaaaacaaagatttaactcatttaacccagcatttttagttgttttctttctttgctttgggattagaagtttcttgtttttttgataaagtctcactctgtcacccaggctggagtgcagtggtgtgatcatagctcactgtagcctcaacttcctgggctcaaatgatcctcccatcacagcctcccaagtagctgggactacagatgcgtgccacaacagccagcagattttgtttattttttataaaggagaggtctcactatgttgtccaggctggtcttgaactcctgaggtcaagagatcctcctgcctcagcctcccaaagtgctaggattataggtgtgaaccaccacatctggcctgttttcttgccttttaatcttgggcctctttctagactgtgggccctataggggcacaaaaggagactgtgtcagtcttggtgccactgtggccctgcgccccactcaggattggcgcacagcggtagcgcaggacatgtttgttaggtggaaggccatcccttccttcttgggttcacccaggcccatctctccctcctctccagctctgctcccatgggccctgtgggtgtccatgcctggttctaagttcctgacatggcttgacatacttgcctgtgggtggcagctttgaagatggccccagggatccctgtctcctgctcttcccacttgtatggtcccctccctttgagtgtgggctggacctagtgacccctttcttttttttttttttttttttgagatgggagtttcgctttgtcacccaggctggagtgcaatggcgcgatctcggctcaccgcaacctccgcctcccaggttcaagttattttcctgccttagcctcctgagtagctgggattaccggcatgcaccaccacgcccagctaattttgtatttttagtagagacggggtttctccatgttggccaggctggtcttgaactcccgacctcaggtgatctgcccgcctgggcctcccaaagtgctgggattacaggtgtgagccactgcgccctgttttttttttgagacggagtcttgctctgccacccgggctggagtgcagtggtgtgactccactgcaccctccagctcccaggttcaagcaattctcctgtctcagcctcccgagtagctgggattacaggtgcctgccaccacacccggataatttttgtatttttagttgagagggggtttcaccacattggccaggctggtctcaaggtcctaacctcaggtcatccgcctgccttggcctcccagaatgctggtattacaggctgaaccactgcgcccagccctagtgactcccttctaatgagtaaaatacatcagaattgatggaggctgggtgcagaggctcgtgcatataattccagcactttgggagcccaagatgggaggattgcctgaggccaggagttcaagaccagcctgagcaacatgatgagactccatctctacacgcaaaaaattagctgggggagtggggctctcctgtggtcccagctactcaggaggctgagtgggaggattgcttgagtccaggaggtcaaggctgcagtgagccatgattgccccactgcactccagcctgggtgagggagcaagactctgtcttgaaaaatgaaggggtgctgacaaatcccatttaacacgtgagagaacagaggcacagagaggggaggttatttgcccagaaacacacagccggggaggcacaggactccagagcatgtgctcttagccactgtgccgcactggagtggttggggtgctaaatttagaccttggcttcagaaaatatttcagcaccctgccctgactctcctaacatgccctgtacttcctgcatgaaatctgatcgtattcatccttgttgatttcttccgccctggagtcctgggcccagagctggacagtgggctcattgtccccaggctgggggtggcttgagcagctgccaggcagggctgcctaggcatgtggctggaaccaagtacaggaatccactgcctgctggtgtgggcatccttgagagagaacgagtgagaccaagagaccgggaggctgggggtgaatcctcgtgttcccacatctagctctggtgtttagcctgacggtgaccaactgtggcctcagttcctgtttcttgttgttgtgttgcctctggacgggcaccctactggcaggggctgtttcctgtggttactccctcaataacagccctctccccatggatgtaacatttgtaccccatcatggagttcttggggtgctccgtcaaattcacccacaggaagcccttagagcagaattgggtgtatactaggtgctccaggctgggcatggtggctcatgcctgtaatcccagcactttgggaggctgaggcgggctgatcacctgaggtcaggagttcgagactagcctggccaacgtggcgaaaccctgtctctactaaaaatacaaaaaaattagctgggcgtggtagcgggcacctgtaatcccagctactcgggatgctgaggcaggagaatcgtttgaacccgggaggcagaggttgcagtgagctgaggtggcaccactgcactccagcctgggtgacagagtgagactctgtctcaaaaaaaaaaaaaaaaaggaaaaaaaaagacgcaggcattgggcacctgctgtgtgcctcatgggcacttggcctgccactggctacgtcgccagcacttgataaatgctttgtaataagtctgccagggattagagggaccctgggaggaggctttgtttctgggttgttctgtcctcaaattgctctgtgaccttgggcgtgtccattccccactccgagcccccagttcattcattatttgacaaatggggatctgagggacctattttggagggtggatataaggttagcacagggcatggcagatagtaggtgcttaataaacactgagaatgatcatctgtttttttttttttttttttttttgagacatggtctcacactgtcacccaggctggagtgcagtggtgcaatcttggctcactgcaaccttcacctcccgggttcaaacaattcttatggctcagcctcccaagtagctgggactataggtgcccaccaccacacctggctaatttttgtatttttagtagagacggggttttgccatgttggccaggctggtctcgaactcctggcctcaagtgatccacccaccttggcctaccaaagtgctgggattacaagtgtgagctactatgtctagctgagaatgattatcttggctgctctgtttattggttgaatggatgagcagcgcttttttttttttttttttttttttgagactgaatcttgctcgattgcccaggctggagtgcagtggtgtgatctcagctcactgcaacctccacctcatgggttcattctcctgcctcagccttctgagtagctgggattacaggtgtgcaccaccatgcctggctactttttttgtatttgtagtagagacagggtttcatcatgttgaccagggtggtctcaaactcctgacctcaggtgatccacccaccttggcctcccaaagagctgggattacaggcatgacccaccgtgcctggccttctttctttctttctttctttttttgagacagggtctcactctcattgcccaggctggagtgcagtggtgcaatcttggctcactgcaacctccacctcctgagttcaagcaagtctcttgcctcagcctcccgagtagctgggattacaggtgcccgccaccatgcccggctaatttttttgtatttttagtagagacggggtttcaccatgttgggcaggctggtcttgaactcctgccctcaggtgatccacccacctcagcctcccaaagtgctgggattacaggtgtgagccaccgcacctgccgcccacctttttctaaaataaatttaaaaaattattttaacatagagatgaggtctcactatattgcccaggctggcctcgaactcctggcctcaaatagtccccctgtcttggcctcccagagtgctggaattacaggagtgagcccctacacctggccctgaagtgttgacattgaactcaactagcagcactaaaacccacgcctgaagaaagctgctgtaacacacatattttctccatgaggcacatcacaccagacaagcgcctcagccctgtgcttgggggtcattttcaacagcgaagtcaccagcaaaaatcacaaaaatgcagctgggcgcggtggctcatgcctgtaatcccagcactttgggaggctgaggcaggcggatcacctgaggtcaggagtttgagaccagcctggccaacatgatgaaaccccatctctactaaaaatacaaaaattagccaggtgtggtggcaggcacctgtggtcccagctactcaggaggctgaggcaggaaaatcgcttgaacctgggaggcggagtctgcagtgagccaagattgtgccattgcactccagcctgggcgacagagcaagactccgtctcaaaaaaaaaaaaaaaaaaaaggcacaaaaatgcaaaaaacatggcactaaatagactgtgaaaagggtgcttgtttacaatgtgagagctgaattaaggaggcagagtgggccagatgcggtagctcacgcctgtaatcccagcactttgggagtctgaggtgggaggatggcttgagcccaggagtttgagaccagcctgggcaacatggcgaaaccccatctctacaaaaatacaaaaattagccaggtgtggtggtgtacgcctgtagtcccagctactcagggggctgaggtgggaggattgcttgagcccaggaggcagaggttgcagtgagcggaggttgcagtgagccgagattgtgccactgcactccaccctgggcaactgagtgagaccctgtctcaaaaaaaagaaggcagagtgttgtcttgatgacttcagatgggaacatgcatgttggcaattctgatttttcacctctccacatgtgtttgagtatggcggtgaatggcagctactcaggaggctgaggcaggaggatcacttgagccctggagtttgaggccgtagtgagttataatggtgccaccgcactccagactaggcaacagagtgagaccctgtctctaaacaataaaaaatttaaaaaattatcagctgggaacagtactcacgcctggaatcctagtactttgggaggccgaggcaggcggatcacctgaggccagaagttcaagaccagcctggccaacaaaatgagatcccttctctacaaaaaaataaaacaaaacaaaacaaacccacaaaaatccctttactggcaattttggagatgcagggaggcacaaaggcctgtcagtgtctttgtactggatttgctgtctttgtcatgaaatcactgaattttcccacttggtttgagccccgttagtcatcagcctgcagcggggggccccattcttgtgcaggctgcccagttttctgttgtaaagacaatccattgtataggtcatccctcccctgcttagggcgtttggtgtttttctgatcttctgcactttggaagctacaatgaatagcactgttatttcccatatgcgaatttaatatgccaaactttttattttttaaatttttgagacatacttcatattctattgttgtttctttctccctctctctctcaatttttttaagatgagtcttgctctgtggctcagctggagtgcagtggtgcaatctaggctcgctgcaacctctgcctcccacattcaagtgattcttgtgcctcacacttttgagtagccgggattacagggacccaccaccacgcacggctaatttttgtatctttagtagagacggagttttgccatgttggccaggctggtctcaaactcctggcctcaagtgatctgcccaccttggcctcacaaagtgctgggattacaggcgtgagcccctgtgcccagcctggtctgctctttggaagctacagtgaatagcactgtcatttcccccattcgactttaagatgccaaattttttatctttcgatacaaaaaaatttttttttgagacggagtctcactctgtcacccaggctggagtgcagtggcatgatctcagctcactgcaacctccacctcccaggttccagtgattctcctgccacagcctcccaagtagctgggactgcaggaatgtgccaccatatccggctaatttttgtatttttagtagagacggggtttcaccatgttggccgggctggtctcgaactcctgacctcaagtgatctgctcacctcggcctcccaaagtgcacagattacagacatgagccactacacctggcctattttttaaaaatttttgagacatatatttctattgtcatttctttctcttttttttttcatgaagaagttttactctgtcacccaggctcaattgcagtggcattatcatggctcactgcaaccctgacctcctaggcccaagcgatcctcctgtctcatcctcctgagtagctgggactatacatgccacaatggccagttaatttttttctttttttttttttttttgcagagatgaggtctcagtttgttgcccaggctggtttcaaactcctgagctcaagtgatcctcccaccttgacctttcaaagtcctagcattataggcgtgagccaccgtgtccacccaatttttttaaaaattttaattttaggctgcaggttgcacgtgctggtttgttgcattggtatattgtatgatgctgaggtttgggcttgtaatcatcccattgtccaggtagtgaacagaatagaatatccaataggttattttcagctgccccttatggagttcccagtgtctgttgttcccatctttgcgtccgtgcgtattcaatgtttagctcccacttataacgaaaacgtggtatttggatttcttttttttttttttgagatggagttttgctcttgttgcccagcctggagtgcaatgacgcgatctcggctcaccgcaacctctgcctcccgggttcaagcaattctcctgcttcagcctcccaagtggttgggattacaggcatgcgccaccacgcccggccaattttgtaattttagttgagacagggtttctccatgttggccaggctggtctcgaactcccaacctcaggtgatccatccacctcagcctcccaaagtactgggattacaggcgtgagccactgggcccggcggtgtttggatttctgtttttgccttaatttgctcagggtcatggcctccagctgcatccacgttgctccaaagcacatggtttagttcctttttttttttttttttttttgagacagagtctcaatctgtcacccaggctggagtgcagtggcgcaatctcggctcactgcaacctctgcctcctgggtccaagtgattctcctgcctcagcctcctgagtagctgggattacaggctcatgccaccacacctggcctccatttacattttttaaaaatgattttaaaaaatttctgagatagggtctcactcccataacctaggctggagtgcagtgacacaatctcggttcactgcagccttgacttcctgggctcaagcgatcctcctgcttcagccttctgagtagttgggactacaggcttgcgccactaccctggctaatttctgtatttttagtagagctggggtttcaccatgttgcccaggctggtctcgaactgctgggctcaagcaatcctcccacctcagccttccttccaaagtgctgggattacaggcatgagccagcatgcctgcacggctgattgacattttttgaagttctctccttaaggagggaactctccagttggagatgttaatttatcagcagcccatgagccacccagagagcagcaggacaggtccctgcagggagacctggtgggccagaacctgcccggggccccttagatcgggctggggccacgggtggctgctctctccctaggcctgcaggattggaacctgatctgagagtcccagatgcctctcttccttcgagattatttgtagcaagctctctgtgctccaggagagctgggtcttgggcggtctcctcccctgctgcctctctggtactagaatgtaacagatgcatgccctgtctacccagtatagggagggacagaccaaggacacggtggtaaatgagtacattgcacgtggcgtttaaagactagaagtgcccgccgggcgcagtggctaacgcctgtaatcccagcactttgccggggtgaggcaggcggatcacctgaggtcaggagcttgagaccagcctggccaacatgacgaaactccgtctctactaaaaatacaaaaatggccaggtgtggtggctcatgcctgtaatcccaccactttgggaggccgaggcgggtggatcacgaggtcaagaaatggagaccattctggctaacatggtgaaaccccgtctctactaaaaatacaaaaattagctgggcgtggtagcatgtgcctgtagtcccagctacttgggaggctgaggcaggagaattgctggaacccaggaggcaaatgtttcagtgagccgagatagcaccactgcactctggcctggacgacagagcaagactctgtctcaaaaaaaaaaaaaaaaaaaaaaaagggtggggagagaatggagcgggaggagggtctgtatcaccacagggtcttggctagtgtgggctttgcactcagtaggtgctcaccatttcaagaatcagagttcatgcttctgcaactggctgctagggagggcagatgccctaggtactggacccaggggcatgaaatgaacattggtccaccctctattgactgagcacatactccagcagatgcatagatgctagagatgcacagatgctagagatgcacagatgcacagatctcctgcgtgctcacaatgccaatgaatgatggagggaatgaatgaatgagggaatgagtgaaggagggaatgaatgaatgagggaatgagtgaaggagggaatgaatgagggaacgagtgaaggagggaatgaatgaatgagggaaggagggaatgaatgaatgagggaatgagggaatgaatgaacaaaggagggaatgaatgagtgaaatgagtgaatgaatgagggagaaatagacccatgacctggtggctctgcacaaggctttgatggggagagtgaaggtgacagggagggctcccagggtagaacagagagctccctgacaccagccagtgccccactgaccaagtgcggccccattttgagggagctgtgattggggagcagtaagcatggtgcatgggccatgtggtgcctggaaggtttcctgagggaggcaatgaggctgctggggggagctctgtgagtgggtgtgtgtgtgggggctgtgctcagctcagtgagcttgtgggtcatggtgggtagggaagtattgtcactaggagttcagcagcctgctcatatcccaaaagtagccagaggggccttctaggggcttccagggtaagtggtttgacccatgcaggaagtctcatgaaaaccctggacctttgtttttagaaattgcggatgctctcccccaacagaccccggcaccctcctatctccatggctttcattgtgaacccctcctggggcccatgagcctcatggagccggcccctgcccacctcagacttcattcccctttcatgtcgctttcccctaattccccccacactgacctccacgctggtcctcaactgtgccccattcccaggcctgttcccaccccagggcctttgcactggctgcattccggatgtacccacagcgactcccttttgcctcaccaggtcctgctcagatgccgcctgcctctctcaagggcctcccctgcctctgcccttggtccgtgtgactgaccacatcaccccttgcagtcttgtcaccatccagcacggcctggtattcagtcatatacatggaaggggtctctcttcccagaggactgtgaaccccagagggtggggcctggtggtctggatgctctgtccccagagctgagaacagtgcctaaagcacaacagacactggtatgcaccagctgcctgaatgaatgaaggaaggagggaatgaatgaatgaaagagggagtaaatgataaatggagggaaagaataaaggagggaatgaatgatggagggaataaatgcatgaaagaggtaataaatgaacaaaggagggaatgaaagagtgaaggagataataaataaggatggaatgagaccagatgcggtggcccacgcctgtaatcccagcacattgggaggccaagggaggaccacctgagtccagtagttcgagaccagcctggccaacatggtgaaaccctgtctctacaaaaaatacaaaaattttgctggccctggtgacgtgcacctgtagtctcagctactagggaggctgaggtgggaggattgcttgagcctgggaggtctgcagtaagccatgatcatggactctagtctgggcgacagagtgagaccctgtctcaaaaaaaaagtactgaatgagtgaaggggggaaagaatgaatgacggagggagggaaagagtgagtgaagtagggaatgagtgaatgaagatggaatgaatgatggaatgaatgaaggagagaatgagggagggaatgaaagagggaaagaacgaagaagagcatgaatgaatgaccgagaggatgaatgaatataggtgctgaagtccactgtgaacattttggggggtgtgagcagccattgcagggatctggggaggcctgggaaaggcaggggagatccaaaggatggatttggtgattttgatgcagaagctggagggaggcagtggccgggccaggctgaaacaggggcaggtgggtggagcccctgccctgtgttggtcagggctgggcagggccaggtactacaacaaacacaccccacattccagtggcttaccccagtacaaggttattggttcccagagccaggggcgcagggtggtggggcagggagccaggaaggggtggggaccactcatttctccagcttctcaaccaagaaaatctgaatttccagcttctgtgatctaaacttttcctttcctttccatttcctttttgtttccttttttttttttttttttgatggagtcttgctctttggcccaggctggagtgaatttgcgtgatctcggctcactgcaacctctgcctgctgtgtttaagcaattctcctgcctcagcctccggagtagctgggattacaggcgcccaccatcacgcctggctaatttttgtatttttagtagagacggggtttcaccgtgttagccaggatggtctcaatctgctgacctcatgatccacccgcctcggcctcccaaagtgctaggattacaggtgtgagccaccacgcctggcctaaagcatttcttgtttgtttgtttgtttgtttgtttgtttgtttttaaagttcattcttggctgggcatggtggctcacacctgtaattccaatactttgggaggccagggctggtggattacctgaggtcaggagtttgagaccagcctgaccaatatgatgaaaccccgtctctactaaaaatacaaaaattagtcgggtgtggtggtgggcacctgtaatcccagctactgtggaggctgaggcaggagaattgcttaaacccaggaggcggagggtgagccgagattgcaccactgtactctggcctgggcgacagagtgagactccgtctcaaaaaaaaaacaaaaaaacagttcattctcattcatctaacagcaagtggtggcccgcctgcctccacacaatcattcaggaacccggctcctttcactgggggctctgcagttccctggggcctctgcccgttatatctactagcgagtggggaaggggaacttggaaccctccatctgggcttggcattggtccttacaccccccatccactggcacatctcctggccctacctggggcaggggcaatccctccccagttgggggcacacgtgctagatgcttcagccatctgtccctggtgccacccagtgacctgggggcagaacagctgcccagctcggggctggaccctgggggtcctggttagggtggtctgagcatgaagagtccaggctggaggtgctgggggatggtgtcaggtgctccagacgtcgcaggggacagaaaggaggatgggttcaggccccagctcccccagggccaccaagccagctggggtatgggggaggacagggtgactggtttattacgctttgagaatctaccttcttcctggctggttggtaaatggcccttgcccttggtccactgagagatccagccaccaaaagtttcaccatagacctcatcaaagcccctggctgccctggggtcctccagcggggaggctgaggctcccagaggccaggcggggcagggcaccagtgacgctgtcccctccgtcctccctcccagcggtctctctgtgctgatccgcgtgcgcctggagctgcggcggcaccagcgtgccggccacaccatcccgcgcatctttcaggcggtagtgcagcgacagcccgagcgcctggcgctggtggatgccgggaccggcgagtgctggacctttgcgcagctggacgcctactccaatgcggtagccaacctcttccgccagctgggcttcgcgccgggcgacgtggtggccatcttcctggagggccggccggagttcgtggggctgtggctgggcctggccaaggcgggcatggaggccgcgctgctcaacgtgaacctgcggcgcgagcccctggccttctgcctgggcacctcgggcgctaaggccctgatctttggaggagaaatggtggcgggtgaggccaggcgtgggcatcaggtgggcggggacccaggactggcccctgggcgggcggggagatgctgcgccccaggcctcggaaggcggccgccctggacgtgggcatgaggtgcacggtctgggtatgccccgggcagggagttggtgcatcccaggcctcgggagggggcctgtccggcggtgaccatgacccatgtgttggggaccacagcggtggccgaagtgagcgggcatctggggaaaagtttgatcaagttctgctctggagacttggggcccgagggcatcttgccggacacccacctcctggacccgctgctgaaggaggcctctactgcccccttggcacagatccccagcaagggcatggacggtgagtcaagggtgggacccctgctctatcaactggtttcctacccgcccaggccccgcccccaacttccaggccccaccccccaatgctcaggccccacccctaacacctgtatctcctgcagatcgtcttttctacatctacacgtcggggaccaccgggctgcccaaggctgccattgtcgtgcacagcaggtgaggggcccacaggcataatgccctcagccgctgagagtgacccaggctatcttgccagcctgacctgcccctcagctcctgtgggcatctccatgttaccctggggacagagagggcagctggtgtttcctgagcacttgctctgtgtccagaccagggccaagccctccacgtgtaaactcattgcaaccctcataactgcttggggctggacaaaggcatcacacccattttcacacccatcttgggacccggttgccctgtgcccactactctggggcccctctcatccccccacctgttcaccacatccatcccaccagcaaaacccgtcctctccatctgtctacttttttccatgccccccatctggacctgtgccagcccctcctcgggctcctcctgctccccccactctctcctccacccacgatggcccagctcctgtcagcagctacaggaggtttgaaaatcctaaatcagacctcccctgtcccagacctccctgcatctaccgtgaccctcagaataaaaccctctctcgggctaggcgtggtggcttacgcctgtaaccccaacactttgggaggctgaggcaggcgggtcacttgacgtcaggagttcgagaccgtcctggccaacgtggcgaaaccctgtctctactaaaaatacaaaaattagctgggcgtggtggcacatgactgtaatcccagctactcgggaggctgaggcaggagaatcgcttgaacccagaggcggaggttgcagtgagctgagatcccgccactgcactccagcctggatgatacagcaagactccctctcaaaaaaagaaacaaataacaaacaaaaaccctctctcagtttgggtggcttctgccacttccctgatgtcattttcctccccttcaccccgtactcactcctcctcagccccccaaactcttcaaacccatacactccttccggcctcagggccctcacatgtgctgtgcctgggcactcttccatagctcgcccccacagctctttcttgctaggtctcggatcacacttcacctccctagacaggatcccccaacccccctggctgcattaccatcagcccctctatgccccttgaccctattatatccctcgtgacacctaacaccaccaacaattgttggttgcgtgtttccttcctgccagcctgtgaactcatgcgaactgggctggctttgcctgggtccacatgcagcatgcttccccatgcctgtaccctgggggatttaggtcccagcctctgccctcccggctccccctccccctgcaggtactaccgcatggcagccttcggccaccacgcctaccgcatgcaggcggctgacgtgctctatgactgcctgcccctgtaccactcggcaggtactacggcctgggtagggaatggtgggtgggggcgggggaccccttaccaaggccaccctctgcaggaaacatcatcggcgtggggcagtgtctcatctatgggctgacagtcgtcctccgcaagaaattctcggccagccgcttctgggacgactgcatcaagtacaactgcacggtcaggccctgccctgttctgtctagaccccgcccctcccagccaggcctcaccccctcccaatcaggccccacctcctcccggtgaggccccgtacctcccagcaaagccccacctcctcctggtcaggtcccgtcctctcccagccaggccccgccccccgaccaggctctattcccttaactcccttatgtgcgccctcctgtccacctgctggcgcaacctgctcccccgtctctaggggtggggtggggagcggggcttaaggaatggctgttcaggatggggacagagagggcaagtagtgtttcctgagtacctgctctgtgtccagaccagagctaaaccctccacgtgtaaactcaatgcaatcctataactttggagggtggacccattttgcagctggggaaactaaggcttgtaatgcggctaggattgggcccagggtgcctgagctccttaaggcaatgccttccccatgccttgtgccctgtgggtcttccctgctgctgactgtagggaattgagaccctgggatgggaagggcgatgagtctggggcttccaggtgaggaacgcgtgaggcggaggtggaggcatctgctgtcccggagaggagagcaggcagaggttaagaacaggaattcttctttcccctccacagtgagaggagaccaggctgagggtttcagtgctgtaatgtggggcaggatacaggaaatacaggcgggaggtacaggaaacaggtatggagcccggagggaatagcaaggctgactgggaaggattgggtgagaggttgtccagggactgtggcaagttggcagatgcagattggacagatggggcccagagagattcaggccaggtcacacagctgagcaggggttgggggctctgggctgagcatcttggggtataccacaaggtccacagctgtgcttggcttcgcttttgaggagttttggttctgtttggagggtcttgggaaaattactaatctgcatgttgaaatgcaaaagtatatttttattattattattattttttgagacaggatctcactctgttgcccagactggagtgcagtggcgctatcatggctcactgcagctttgacctcctgggctcaagtgatcttccagcattggcctcccaagtagctgggactacaggtgcgcaccaccacgcctggcccacttttgaattttttttgtagagaagaggtttcgccatgttgcccaggctggtctcaaactcctgggttcaagcaatccacccacctcggactcccaaagtgctgggattacaggcatgagccactgtacccagcccaaaattatcttttaaaaaaaattacagagagtagcaaatacacataaaagtggacagaaaagtatagagagttctggtgcacccctcagctggacccagaggctatcagataccctgtcctgcccctccccacctccccacatcctcccctcggtgatggcataaagcatccctcagacggcatcatgtttcctgtgtagctgtttcactataacctttgaaagatgagtacttgttttttcaaattaaagtgaaattcatataaattagccatattaaagtgaaaaatttggccaggcacagtggctcacgcctgtaatccctgtacttcgggaggctgagatgggcagatcacttgaggtcaggagtttgagaccagcctggccaacagggtgaaaccctgtctctactaaaaatacagaaatgtagcctggcgtggtggttggtgcctgtaatcccagctactcgggagactgaggcggaagaatcgcttgaacccgggaggcagaggttgcagtgagccaagattgcaccactgcactccagcctgggcgtgacagagtgagactccatctcaaaaaaaaaaaaaaaaaaaatttggccgggcatgatgatacacacctgtaatcccagctgcctggaaggctgaggcaggagaatcgcttgaacctgggaagcggaggctgcagtgagctgagatcgggccactgcactccagtctgggtgacagagtgagattccatctttaaaaaaaaaaaaagtcagtaatttggtggcattcacaatgtacaatcaccatgtctatctagatccagaacattctcatgccccccaaaggaaatcccatccccagttactccccatccctccacccccagcccctggcaaccactattctgcttcctgcctctatgatttgcctgttctggacatttcagatcaatggagtcagacactgtcgccttttgtgtctggtaagcattgtttttaagtgacagtgatatctcagtgtcatcaggaatctgggcagtggctcaattctgtctcacaatgtcaaaaatgtgttttttcttatttccataattaaatacacaaccagcattatgactggttgatgtgtcttgtaagaattcttggctgagcgcaatggctcatgcctgtaatcccagcactttgggaagccgaggcgggaggatcgcttgagcccaagagttgtagaccagcctgggcaacatagtgagtccctcatctctacaaaaaaattgaaaatctagctggttgtggtggtttgtgcctgtagtcccagctgcttgggaggctgaggtgggaggattgcttgagcccaggaggtcaaggctgctgtcagccgtgattgtgccagtgtactctagcctgggcaacagagcaagcccctatctcaaaaaaataaaaaaaagaaaagaaaagaaaagaaaatatttcatctgtaggtgccttttctctttctgtctgtctctcttccctcttggaatttatttattacagaaattgagatagtgtccagaacaggtttgactcttaacatttggggctggatcattccctggggtgggacgtgtcctgtgcattgtagcatatatttagcaacatccctggcctccctgcaccagatgccagtagcagtccccttcccccaagttgtgacaattaaaaaaatgtgtctagatgttgctaagtgtccctgggggacagaatggtccccgcttgagaatcgctggtctatatattttatcggcttcaaactcaacttttttggcaaagattccttatgggtggtgtggtgtcctcccactgggaagcccgtcatgtctgatggtctctctttgtccttgacacaccatcttgcattggttactacttactgtctcctgggccttggaagctcattctgtcagtttcctagaagtggaatttctgtgtcaaataaggcacacagtgaacattgagaggctttttaagaaatagaggatgggaaattagctaggcatggtgggcgcctatagtcccagttatttgggaggctgaggcgggagaatcctgtgaacccaggaggtggaggttgcagtgagccgagatcgcaccactgcactccagcctgggtgacaagagtgagactccatctcaaaaaaaaaaaaaaaaaaagaaaaagaaatagaggacggggccgggcgcagtgtcttacgcctgtaatcccagcactttgggaggccgaggcgggtggatcacctgaggtctggagtttgagaccagcctgaccaacatggagaaaccccatctctactaaaaatacaaaaattagcagggcgtggtggcacatgcctgtaatcccagctactcaggaggctgaggcaggagaattgcttgaacccgggaggtggaagttgcagtgagagccgagattgtgccattgcactccagcctgggcaacgagagcgaaactccgtcttaaaaaaaaaaagaaagaaatagaggatgggaaattagccaggtgcggtggtgggcacctgtagtcccagctatttgggaggctgaggcaggagaatcctgtgaacccaggaggtggaggttgcagtgagctgagactgtgccactgcactccagcctgggcgacagagtgagactccatctcaaaaaaaaaaaaagaaaaatagaggacagggccgggcgcggcggctcacgcctgtaatcccagcactttgggaagtcgaggcaggtggatcacctcaggtcaggagttcaagaccagcctggccaacatggtgaaaccccatctctacaaaaacaattagccatgcatggtggcgggcacctgtagtcccagctacccgggaggctgaggcaggagaatcgtttgaacccgggaagtggaggttgcagtgagccgagatcgcgccactgcactccagactgggtgagagagcacaactccatctcaaaaaaaaaaaaaaaaaaaaaacaggacagaatctctaaaggtgatgtttaataaggacacaaggagaaaacaagagcatacatttatttgggttcagaaattacatctcatgagaaactgctcactgctattttatctgtagcagcagttgcagtctagccattctcatgggggcagcaggctataatctagaaccttacttttttttttttttgagacacagtctcgctgcatctcccaggctggaatggagtagtgtgatctcggctcactgcaacctccttctcctgggttcaagtgattcccctccctcagcctcctgagtagctgggattacaggggtctaccaccaagcctagctaattttttgtatttttagtagagacggggtttcaccatgttggccaggctggtctcaaacttctgacctcaggtgatctgcctgccccagcctcccaaactgctgggattacagccatgagccacagcagccggcttttgttgcttatttctttcttactgtacacgtgctaacaaaaaagggatggtggagcccccagggtggacatgcccagccccaggtagctgtttcttttttttttttttttgagacggagtctcgctctgtctcccaggctggagtgcagtggcgcaatcttggctcactgcaagctccacctcctgggttcccaccattctcctgcctcagcctcctgagtagctgggactacaggcgcccgccaccacacctggctaattttttttttgtattttttagtacagacagggtttcacggtgttagccaggatggtctcgatctcctgacctcatgatctgcccacctcggcctcccaaagtgctgggattacaggcgtgagccaccgtgcctggcctttttctttttctttttctttttgagacggagtctcactctgttgcccaggccagagtgcagtggtgcgatctcagttcactgcaacctccacctcctgggttcaggtgattctcctgcctcaggctcctgaatagctgggattacaggtgtgtgccaccacgcctggctaattttgtatttttagtagagatggggtttcaccatgttggccaggctggtctcgaactcctgacctcaggtgatccacccaccttggcctccgaaagtgctgagattacaggcgtgagctaccgtgcccggccacaggtagccctttttatcggtgcagctgctggcatcccctgctgcaagcttccagcttccttatttgtgtttgcagcccaatcttccaggctgttctttgttagaaaataagtgatttcttgggctgctttttgttagaagggaagttctaccgaggattttttgtttccaaaaaaaaaaaaaataggcaacgtagagtagctactcacctgcataataagagattgggttgggggctgccagagatttgcgccctatgcggatggcacatctggtcctcaccggtttttcacggtctatttagatcagatacagcctccctgctagcttgtctgtaaaaatccttgccttttttttttttctgaggcggagtctcactcttgtccccaggctggagtacaatagagcgatcttggcttactgcaacctctgcctctcgggttcaagagattctcctgcctcagcctcccaagtagctgggattacaggcacatgccaccaggtctggcaaaattttcttgtatttttgtagagatgaggtattactacattggctaggctggtctcgaacttctgacctgaagtgatctgcccacctcggccccccaaagtgctgggattacaggcatgagccaccgcgcccagccatgtgcccattttttttttttttttgagatggagtctcgctctgtcgcccaggctggagtgcagtggcgcgatctcggcccactgcaagctccgcctcccgggtttacgccattctcctgcctcagcctcccgagtagctgggattacaggagtgtgccaccacgcccggctaattttttgtattttttagtagagacggggtttcaccatgttagccaggatggtctcgatctcctgacctcgtgatccacctgctttggcctcccaaagtgctgggattacaggcttgagccaccccgcctggccgtgcccattcttaagccagtcatattggctgaggaggggctgggctgattggccaggttctctcctagagatggtgtgggctgtaccacacctaaggcagtggcccaagtctgagaatggagggagaggaccctcccccttagggacctgctgttggtcagcagccagtgatcttgggtgcactgcatttcctctctgggcctcagtgccttcatctccaagctcagctcagagcatggcggtggtgtctgctgatcatattggtttagtcatcagctatttagtcagtaccttctcaggggcacagctgggggcacaggggatgcctctcagtgacgtttgagctgagactgaagagttcaggcaaatgcatctgggggaagactgcttcaggcaaaaggctagcatgtgcaaagtccctgaggaggcagagtgttcagcggagatggagggagaggaggcagcaggggcggcagggccagatccagttggccacaggaagaaatgtgggtttcatcctgtgtgtgagcgggaagccccgagcacatttgcagctgttatgatccatctggtgggtaatccctggcatgcaactgttttattcccactctggggccgggatgcctgggttcaaatcaaattctgccacttcccagctctgtgatctcgttccagttccttaccatctgtgagcctcggtttctccatctgtaaagtggcggggggggagtcattccgaagcccaactggagatgagaactcttaaaggcaccgtggggcacctggtggatgaccccaggaagctcttgcggggcttgagaatgtgtggcagggagggaagatgtcctgcagggggagcccatgagcaggtggctccgtgggcacctggggctcagtccagacgcagcgcagcctagtgggtgcacctgggagtggtctgcccaggggtgacgctccggccagcccaggctcagccagggggctctgggtgacagtgtaggctccaggctgagggttgccctgcggggtgccagctctcctgctagtcctgccctgtgtgcctgctgaggctcagacagggatgtggtatctccaggaagctgcttggcagaatcgagggaccacgaaggggtgcgggtagggggaggaggaaagacactgcatctgcttggatagaagttgcatccggccaggcacaagtggctcacacctggaatctcacactttgggaggctgaggcaggaggattgcttgaggccaggagttcaagaccagcctgggcaacagagcgagatcccccatctctacaaaaaaatctgtagtcccagctactcgggaggctaaggctggaagatcacttgaacccaggagttagaggctgcagtgagctgtgatcatgccactgcactccagcctgggcggcacagggagacccccaaccaaaaaacaacaaaaaaagctgcatcctagaccctttgcaagagactgaacgagtcctaggagtcaatgtggtccctaatggagtgtggacgattctgcagccatcatcatccttaggctgttccgctcataggattagctccctgggtggggcggtctcggggtctctcctctgatccgggctccccaccgcctgccggtcccatcacccacttcctcaccccgtcccccaggtggttcagtacatcggggagatctgccgctacctgctgaagcagccggtgcgcgaggcggagaggcgacaccgcgtgcgcctggcggtggggaacgggctgcgtcctgccatctgggaggagttcacggagcgcttcggcgtacgccaaatcggggagttctacggcgccaccgagtgcaactgcagcattgccaacatggacggcaaggtgcacaccggcagggccccggggcaggtctcggagttcagggaagaccactgtctcctcttcctggggcccctgggatacataaaacagcctggactggcgcggaaggctccgccaaggcgcacgcagggcggggtgtaaggggagttcctgggactcccggtgcaccaccagagggacaatcctgcagcctgcacagatagtcatgtgactgtggtccttgggtcaggagagttggaggataggtatggctgtgcgccctggcaagtgcctcagcctttctgagcctcagtttctgcgtgtggagattagcaaggagaatagggctctgtgtaccgtgctgttattttgttgttgttgtttgagacagagtctcgctctgtcgcccaggctggagtgcagccacgtgatcatagctcactgtagctttcagttcctgagctcaagcaatcctcctgcctcagcctcccaagtagcagcaaacagataccttcataattagcaactacttactctcttaatcatctccattctccgcttgcatgaatctccctctcctttcccaagcccctcccatccaaggccaagaacagaccgtaataatgatcataaagcaaatgtcggctgggcacagtggctcacacctgtaatcctaacactttgggaggctgaggcaggaggatcacttgagcccaggagtttgagaccagcatagccaatgtagtgagacccccttttctacagaaaataaaaaattagccaggcatggtggcaggtgcctgtagtcaatgctactaaggaggctgaggcgggaggatcacgtgagctcacgagatcgaggctgcagtgagctatgattacaccactggactccagcctgggcaacagagtgagactctgtgtctctaaaaaggaaaaaaaaaaacagcaagtgccatgggggctgggtccttaatgccaagaacaatgctccttcctcagtgtgcttggtgttggatggccagcccccagggcacttttgctcactgtagctcagattcttgcataggaaacacaccaggccaggcacggtggctcacgcctgtagggtccagccccacagggtcggtgggtttttctccctgtgtgcggagacgagagattgtagaaataaagacacaagacaaagagatgaaagaaaagacagctgggcccgggggaccactaccaccaagaggcggagaccggtagaggccccgaatgtctggctgcactgttatttactggatacaaagcaaaaggggcagggtaaagagtgtgagtcatctccaatgataggtaaggtcacgtgggtcatgcgtccactggacagggggcccttccctgcctggcagccgaggcagaggcagagagagggagagagagagaaagacagcttatgccattatttctgcatatcagagacttttagtactttcactaattttgctactgttatctagaaggcagagccaggtgtacaggatggaacatgaaggcggactaggagcatgaccactgaagcacagcatcacagggagacggttaggcctccggataactgtgggcaagcctgactgatgtcaggccctccacaagaggtggaggagtagagtcttctctaaactccccgggggaaagggagactccctttcccggtccactaagtagcaggtgtttttccttgacactaaggctaccgctagactagacttcccagacgctggcgtcaccgctagaccaaggaaccctctggtggccctgtccgggcataacagaaggctcgcactcttgtcttctggtcactactcactgtgtcccctcagctcctatctctctatggcccggttttttctaggttatgattacagagcgaggattattataatactggaataaagagtaattgctacaaactgatgactaatgatattcatatataatcatgtctatgatctagatctagtataactcttgttgttttatatattttattatactggaatggctcgtgccctcggtctcttgcctcggcacctgggtagcttgccacccacacacgcctgtaatcccagcactttgggaggctgaggtgggtggatcacttgaggtcacgagttcgagaccagtctggccaacatggcaaaaccccatctctactaaaaatacaaaaaaaaaaaaaattgtttgggctcagtggcatgcgcctgtaatcccagactcaggaggctgaggcataagaaccacttgaacgtgggaggcagaggttacagtgagcgaagattgcgccactgcattccagcctaggcgacagagtaagactctataaaaaaaggaaggaaggaaggaagggaggaacggaggaagggggaaaagcagaaagaaacacaccagacagggtgtagtggctcaaacatgttggagaagcatttctgttcatagaaccatgccaagcagggcggcgggcagcaggtgaagctctgcagtgtctgacgtagctgtagtgtccacacagaggcatctacttcctgccagcatggagggttttgtggatcaggaagtgggtgccagccagaggtcttctcttgactgaatgcaggctgggaaggtgggaggaggggccctgagttggaggcgacgcttactaccctgcttttgcagatcagccaaggtcacagagcttagaatgacactggaggtgctaggtccaagccccagggcaaggcaggcaaagtgttactgagaaggaccccgcatatccccggctccttccaactcagttcaccccattccaggtcggctcctgtggtttcaacagccgcatcctgccccacgtgtaccccatccggctggtgaaggtcaatgaggacacaatggagctgctgcgggatgcccagggcctctgcatcccctgccaggccggtgagcagggcccccgcatggtccccacccggagcaggggtccccacgccctgcctgcctagcgcagcctgaacatggccttctccctaggggagcctggcctccttgtgggtcagatcaaccaacaggacccgctgcgccgcttcgatggctatgtcagcgagagcgccaccagcaagaagatcgcccacagcgtcttcagcaagggcgacagcgcctacctctcaggtgcgcagcctgctaggccccggtgactggctgtgcggatggggatcctccacccatctgcccctctcccctctgccaggtgacgtgctagtgatggatgagctgggctacatgtacttccgggaccgtagcggggacaccttccgctggcgaggggagaacgtctccaccaccgaggtggagggcgtgctgagccgcctgctgggccagacagacgtggccgtctatggggtggctgttccaggcaagctggggttgcagggggtggtcctgaggcatggtcctgagggagctcagccaaaaggggcttagaagtacacatgcctttgggcagtgcacaacctggacaactgctcatggcagcccaggaggaagcactggatctggagccagttcacctgggtgatgttgagcctcagttttgtcatccagaaaatgggatcatgaaagcccacctgtcttagggcttcaatgagccaagcaggagctccacaaaatgtgtggctgcttccataaatgtcatcccaggttgggagagactggagattacagaccaggggctactgcttgacagtgtatctggtcctgctggtggggaggatgagaggcggggtgtcctcagctgagcctctgcctccaggagtggagggtaaggcagggatggcggccgtcgcagacccccacagcctgctggaccccaacgcgatataccaggagctgcagaaggtgctggcaccctatgcccggcccatcttcctgcgcctcctgccccaggtggacaccacaggtgcgagtctcccccactccaatctctctcttcatccatcagtgtgtctgttgattcatgtcttggtccattttgtgttgctctaaaagaatacctggccggggccaggcacggtggctcacgcctgtaatcccagcactttgggaggccgaggcgggcggatcacgaggtgaggagatcgagagcatcccggctaacacagtgaaaccctgtctctactaaaaatacaaaaaattagccgggcacggttgcgggtgcctgtagtcccagctacttgggaggctgaggcaggagaatggcatgaacctgggaggcggagtttgcagtgagcccagatcacgccactgcactccagcctgggcgatagagtgatactctgtctcaaaaaaaaaaaaaaaaaaagaatacctggccgggtgtggtggctcccgcctgtaatctccgcactttgggaggctgaggcaggtggatcacctgaggtcaggagttcgagaccagcctggccaacatggtgaaactgtgtctctactaaaaatacaaaaaaaaattagccaggcatggtggcatgcacttgtagtcccagctactcaggaggctgaggcagaagaattgcttgaacctgggaggcagaggttgcagtgagccgagatcaggccactgcactccagcctgggtgacagagtgagacaatgtctcaaaataataataataatttcaacatgatttttggtgcggacaaacaaaccatatccaaaccatttactcatcctagttcaggacagtgtcctgggactgacacaagggctcacagccagctagcactgtgggctctcacgggtcccttctgctgttttattttagtagttatttatttccattcctcacttccactgccactaagcattctgaaatagtgttttttttgtttttttttttttttttttttttttgagatggagtcttgctctgtcacccaggctggagtgcagtggcgtgatcttggctcactgcaacctctacctcctgggttcaagcgattctcctgcctcagcctcctgaatagctgggattacaggtgtgcaccaccatgcccagctaatttttttgtatttttagtagagatcgagttttaccatattggccaggctggtcttgaactcctgacctcaagtgatccacctgccttggcctcccaaagtgttgggattacacacatgagccactgcacccggcctcggtgtatcttttctttttcttttgttttttttgtttgtttgtttgtttgagacagggtcttactctgttgcccaggctggcatgcagtggcactatcatagctcactgcagcctcagcctcctgggttcaaatgatcctcccacctcagcctctggagtagctaggactacaggcaggcaccaccatgcctgactaatttttttgattttttgtagagatggggtctgtattagtccattctcatgctgctaataaagacatatccgagactgggtaatttataaaggaaagaggtttaatggaactcacagttccacatggctgggatggcctcaccatcatggcagaagacgaaggaaaagcaaagggactttttaatggtggagggcaagagagtgtgtgcaagggaactcccctttaaaaaccaccaaataaagccatcaaatctcgtgagaccccttcactatcatgagaacagcacgggaaagacccacccccatgattcaactacctcccaccgggtccctcccacaacacgtgggaagtatgggagctacaattcaagatgagatttgggtggggacacagccaaaatatatcagggtctcactgtgttgcccaggctggtctcgcagtcctgggctcaggcaaactttttcttaaaggaccagatagttaatattttcggctttgcaggccatacagcctcgattgctattcaacactgctattcttgtgcaaaagcagccatagacaatgtgcaaatgaatgagcatggctgtgtgccaataaaactttatttctaaatttttatttattttttgagacaagatcttgctgttgtccaggctggaatgcaataatgcaatcatagtttactgcagtcttctcctcctgggctcaagtgattctcccacctcagcctcccaagtagccggaactacacgcacgtgccatgacacccagctaatttaaaaaaaaaaaaaaattgttggccgggtgcggtggctcacgcctgtaatcccagcattttgagaggccgaggcgggcagatcacttgaggtcaggagttcgagaccagcctggccaacatagtgaaaccctgtctctaccaaaattttaaaaattagccacgtgtggtggtgcacgcctataatcccagctacttgggaggctgaggcaggagaatcacttgaatccaggaggtggaggttgcagtgagccgagatcacaccactgcactccagcctgggtgacaaagcaagactatgtctcaaaaaaaaaaaaaaaaaaaaaaaaaagggtttttgcagagacagagtctcactatgttgcccaggctggtcttaaactcctgggctcaagcgaccctcctgccttggcgtcccaaagtactgagattataggcatgagccattattgtgcccggccccagtaaaactttatttacaaaaacaggtggagggccaaatttggcccacaggatgtaagttgctaaactcttattcactgtgtaacagacacagccctgcctgtcatgtggggaatggacacatgaccaggcagggtgtacattttcttgccctggtgaggagtggttagggaggcctcactggaggagggggcatgaagccaggatctgacagacaagggggaatcaggcaggcaaaatggggaagaacattcctgcccaggggacagcctgtgggaaggtccagaggtgcaggagaggatattgagttgaggcctcccagaagccacctgctcagcccttatctgccccccatccccactataggcaccttcaagatccagaagacgaggctgcagcgagagggctttgacccacgccagacctcagaccggctcttcttcctggacctgaagcagggccactacctgcccttaaatgaggcagtctacactcgcatctgctcgggcgccttcgccctctgaagctgttcctctactggccacaaactctgggcctggtgggagaggccagcttgagccagacagcgctgcccaggggtggccgcctagtacacacccacctggccgagctgtacctggcacggcccatcctggactgagaaactggaacctcagaggaacccgtgcctctctgctgccttggtgcccctgtgtctgcctcctctccctgcttttcagcctctgtctccttccatccctgtccctgtctggccttaactcttccctctttttcttttctttctttctttcttttttttttaagatagagtctcactctgctgcccgggctagagtgcagtggtgggatctcggctcactgcaacctctgcctcctggggttcaagtgatcctcccacctcagcctcctgagtagctgggattacaggcacccgccaccacgtccagctaatttttatatttttagtagagacggggtttcaccatgttggtcaggttggtcttgaactcctgacctcaggtgatccgctggcctcggcctcccagagtgctgggattataggcgtgagcctctggcccggcctttcctttttcctctcctctcctgccgagagtggaacacgcgtgtcctgggagctgcatcttgtgtagggtccagctgcttttggggactgcaggaatcatctcccctgggccctggactcggactggggcctccccacctccctctcggctgtgccttacggagccccgatccaggcctcctgtggctgttgggttccagatgctgcagctccatgtgacttccaagcaggccctccgccctccctgctgaatggaggagccgggggtcccccaggccaactggaaaatctcccaggctaggccaattgccttttgcacttccccgttcctgtcacatttccccagccccaccttcccctcctgatgccctgaaagcttccggaattgactgtgaccacttggatgtcaccactgtcagcccctgccttgatgtccccatttagccatctccatggagctcctgctggagggccctgaaccctgcactgcgtggctgcccagccagctgcctcctgtcctgggaggaggcctcctgggtgtcctcatctggtgtgtctactggagggtcccacaggagaggcagcagaggggtcaggggaggtctcctgccgggggttggcctctcaagcctcaggggttctagcctgttgaatataccccacctggtggtggcccctccgatgtccccactgatggctctgacaccgtgttggtggcgatgtcccagacaatcccaccaggacggcccagacatccctactggcttcgctggtggctcatctcgaacatccacgccagcctttctggggccggccacccaggccgcctgtccgtctgtcctccctccagcagcaccccctggcccctggagtggtggggccatggcaagagacaccgtggcgtctcatgtgaactttcctgggcactgtggttttatttcctaattgatttaagaaataaacctgaagaccgtctggtgcctgctgggagcccattcattgagtgtccctatgtggcacagaacccttgctgagtttcagaaggcaggactcggccagccgggcatagtggctcatgcctgtaatcccagcactttgggaggctgaggtgggtgaatcacttgagcccaggagttcgagaccagcctggccaacatggtgaaaccctgtctctactaaaaatacaaacaaaataattagctgggcatggtggctcacacctttaattccagctactcgggaggctcaggcaggagaattgctggaacctaggaggcagaggttgcagtgcactccagcctgggtggcagagcgagactctggttcaaaatagaaagaaagagagaaagggggagggagggagggaaagagcgagagaggagaggagagggagggagggagggaatacaaaaagtagccaggcatggtggtgcgcgcacctgtaatcccagctaccccagaggctggggcaggagaattgcttgcgccgggaggtggaggttgcagtgagccgagatggtgccactgcactccatcctgggtgacagagcgagactttgtctcaaaaaaaaaaaaaaaagaaaagaaaaagaagggaccctgtaccatgtggccccatctgcaagaccaaagggaccttggggcaggggcactcgggttggccctctcgctggcctgccgagggggaggcacctccctgcagtgtctgggcctcacaggccctcgttgaccttgtggttgcaggggagggatggccagcctgcctgtgggttcctgcaggtgttgcaggatggctcagatcacggtatgtcctggcacctgtggctgccctggcagtgtcctcttccatgtacaggccggctggtgtgagagctctgggtgaaagtcgctaggcctgctggggtggccgtctgagctgggattcgaacccaggactccaagctcaggagtctatacagtattcctcccaatcgctgggggatatgttccaagaccccaaatggatgcctgaaactgaccataatactgagccctaaatatgttttgtttcttttctttcttcctttctttcctttccttctttttctttcccttcctccctccctccctcccttcctttccttcatcctttcctccctttctaattttaatttaatttaattatttatttatttttgagatggagtcctgctgtctcccaggctggagtgcagtggcacgatctcggctcactgcaagctctgcctcccaggttcacgccattttcctgcctcagcctcccgagtagctgggactacaggtgcctgccaccacgcccggctaatttttttgtatttttagtagagatggggtttcaccgtgttagccaggatggtctcaatctcctgacctcatgatccgccctcctcggcctcccaaagtgctgggattacaggcgtgagccaccgcacgtggcctaatttatttatttttaagacaaagtcttattctgttgcccaggccagagtacagtggcatgatcatagctcactgcagccttgacctcccacacacaagcaatcctccatcagcctcctgcgtggctgagactacagatatgcaccatcacgcccagctaattttttgatttgtttgcagagatgaggtcccactgtattgcccaggctggtcttgaactcctgggctgaagccatcctcctgccttggcctcccaaagtgctgggattacaggtgtgagtcaccgtgcccagtttatactggtttttcaatctcataaccaggaggctactaagtgacaaatgagtgggcatggggggagtggtgtctccagcatggatctgctggacaaaggggtgattcatgaccctgggcgggacagagagggatggagcaaggcagtccgagatttcatcatgctcctcagaacagcacgcaatttgaaacttatgaattgcttatttctggaattctccatttaatatgtttgaactgtggaaacctcagaaagagaaactttgaataagcagggactactgtactctcaactgactctcacctctgctgtccccctcgcgtgtcataatgttggcatcttgtttgttgtctctacctcaggggacaggaggtgacagagcatttgctgggagaggacactgagggggtgaccctcgtgtgcagatgagcaagtgaatttttttgttttgttttttgctttttggtttttttgagacggagtcttgctctgtcgcccaggctggagtgcagtggcacaatctgactcactgcagcctccgcctcctgggttcaagcaattctcctgcctcagcctcctcagtagctgggattgcaggcacgtgccaccacacacagctcatttttgtatttttagtagagacagggtttcaccatgttggccaggctggtctcaaactcccgacctcaggtgatccacccaccttggcctctcaaagtgctggaattacaggcgtgagccatggcacccagctgggcaagtgaattctgactaatctctctccaacctcgcaaccacttcaggaagtgtcaccatggtccccattgtacagatgcagaaactgaggcacaagaaggggaatggactcattgccaggggctccaggtgagacagtggcccagtgaactttcttgttccaaagcctctagctgcaatagtgtctaggaagttccctccaagttggccagaaaataatcccaatgactcttaggcttgaactctgttagtttttcttattaattaacagactttttgggttttatttatttatttatttatttatttatttatttattgttttgagacagagtctagctctgttgcccaggctggagtgcagtggcgagatcacggctcactgcaagctccttctcccaggttcacaccattctcctgcctcagcgtcccaagtagctgggaccacaggcgcctgcaaccacacctggctaatttgtatttttactagagacagggtttcatcgtgttagccaggatggtcgtgatctcctgacctcgtgatccacccgcctcggcctctcaaagtgctgggattacaggcgtgaggcaccgcgcccggcctatttatttatttaagagggagtcttgctctgtcgcccaggctggagtgcggtggcgcgatcttggctcactgcaacctctgcctcccgggttcaagccattctcctgcctcagactcccgaatagctgggattacaggcatgagctactacgcctggctaatttttgtatttttagtagagatggggtttctacttcatttgagaggccggtctcgaactcctcacctcaggtgatctgcctaccttggcctgccaaagtgttgggattacaggcgtgaagcaccacgcctggcctattcctttttttttttttttttttttgagacagagttttgctcgttgcccaggctggagtgcaatggcgtgatctcagctcaccacaacctccacctccggggttcaagccattctcctgcctccgactcccgagtagctgagattacaggcatgtgccaccacgcccagctaaggctttgtatttttagtagagacagggtttctccatgttggtcaggctgatcttaaactcccgacctcaggtgatccacctgccttggcctctcaaagtgctggaattacaggcgtgagccaccacgcccagccctcctttctttttgaatagtcctggcaccgttgccaaagatgagttgaccatatatgcataggtttatttctgcatcagttccaatcatttatttatatgtctatccttatgccaataccacagttttggttattgtacctttttattgtttgaaatgagaaagtatgagtcctcgtattttattcaatattgttttggctattttggggccatttgcaatttattattaattttaggatcaatttgtcaatttcaacaaaaacattgtaaatttgaaagggattacattgcatccgtagaccaatttgtggagtactgccatcttaacaatattatactttccaatccatgaacgtggaatgtcttaccatttatttagatcatctttaattttttttttcaccaaagttttagttcttttgcttgtttcgagacagggtctcactctattgcccaggctggagtggaatggcaggaacacagctcactgcagccttagtctcctgggctcaagtgatcctcccaccacagcctcccaagtagctgggaccacaggcagctgccaccgggtccagccttggcttcccaacgtgctgggattacagctgtgagccaccaagcccagctacagctctcaagaagtacagtcttgtacttcttttattaaatttatgcctactttatactttatgatgctatggtaaatggaattgttttcttaatttgctactgattttaaaatccactacctgtgtgagttgaactgcgcttacacacatcactgaaatatcccactctcagaagtggcccagcctccccaggcccaccaggccttcttccccttccagccctctgtccaggcaagaactcgattggaggcctttctgggcactcagagggacacaccaccacactaggagggttagcttaaaaaattcaacaagcatggccaggcgcagtggctttcgcctgaatgctaccactttgggaggccgaggcaggaagatcgcttgagcccaggggttcaagatcagcctagaccatatagcaagagcccgtccgtccggaaaatgtaaaaaaaaaaaaaaaaaaaattcaacaagcatattttcatcccctacttttttttgagatggagcctcgctctgtcgcccaagctggggtgcagtggcacgatctcggctcactgcaacctccgccaccccggttcaagcgattctcctgcctcagcctcccgagtagctgggactacaggcgcccgccactacgcccggttaattttttgtgttttcagtagagacggggtttcaccgtgttagccaggatggtctcgatctcctgacctcgtgatccgcccgcctcggcctcccaaagtgttgggattacaggcgtcagccaccgcgcccggcggtgcaggaattttaaaactcaccaaaatacgccctccttcagaaaatccctgccacctcgataggacgtcctcttcttgagctcccctctccggccctccctgatacagcaaggttgagcattcgggcactggcttcccgaactcacttcgactcaggcacagcaggcaaagattcaatgggtagggccggaccgactgcccgaccttcgcggtgcttcacttgcctcactgcgcatgtgccaaagacaatcacccaaagtactcgaaaccaagcggcagggccggcccttgcgcaggcgtactagcgacggccgtagggagcgcttcctcctccccgccgccgccctcgccatggccgcgccggccccgggcctcatctcggtgttctcgagttcccaggagctgggtgcggcgctagcgcagctggtggcccagcgcgcagcatgctgcctggcaggggcccgcgcccgtttcgcgctcggcctgtcgggcgggagcctcgtctcgatgctagcccgcgagctacccgccgccgtcgcccctgccgggccagctagcttagcgcgctggacgctgggcttctgcgacgagcgcctcgtgcccttcgatcacgccgagagcacgtacggcctctaccgggtgagagctacgggggccgccggggatcacgccgagagggccacagccaccgcctacaccccggctacggaggccgccgggggccatgccgaaagggccgcgcccactgtctgcacctcggctacgggggccactgggtatcatgccaagagggccgtgcccactgcctgcacctcggctacgtgggtcgctgggggtcatgccaagagggccgcgcccaccggttgccctcggctacgggggccactgggggtcatgccgagatggtcacgcccactgcctgcacctcgactacgggggccgctgggggtctagccgacagggctcgcccgcctcctgaaccccgcctacagtgggtcccgcaggacctcactgcgccctctgcctttatctaggcagggctagaaatggtctacttgcagtccgtcttcctgcttcatccggtggccaggcagagggaacggcacgggcaagggcctggaagggaatccgagtggcccatgtcaaacgatgcccataactcagccccgtagcggacgggggcacgaggaatcaggtgtagagcctgaatctcagggtcctgatctctaaccccagcgagttctcggggatccctgggcagctttgccgctctgatggctctgcttccaggctgttcatctttggctttgagcctcaggattctatagaatcagaggagcgcgctcttttaaagacagggtaactgaggcttggaggagccttggcctggccgagggaagagtgggaggggcgggctcaaaggccaggaacctcaagtcacttgagtctggcagcgtcaagggacaccccatgctgggtgtgccgtcttctctttgcatagaatcttgagctgatgatggttttgtgggttttttattaagagaaaaggcttactgaacgctttatatgcatcaattcatgagtccgtaccacagcctatgagatgttacactcatttcacagatggagaaactgaggccagaagaggtgagcttacctgcccaaggcatctagtgaccagaggggcagccagggtgtgatcctgcctcatctgacttcgtagttgggtacacatttaacttccgccttcctgtgtgtgttttccaagagcatcattaaaaagttttggccgggtgcggtggctcacgcgtgtaatcccagcactttgggaggccgacgtgagtagatcacctgaggtcaggatttcgagaccagcctggccaacatggcaaaactctgtctctactaaaaaaaaatacaaaaattggctgggtgcggtggctcacgcttgtaatcccagcactttgggaggctgaggcgggcggatcacgaggtcaggagtttgagaccaacctgaccaacatggtgaaacctgtctctactaaaaatgcaaaaattagccaggtgtggtggtgcgcacctgtaatcccagctactcgggaggctgaggcaggagtgaggcatgatcagtgaaccgagatcatgccattacactccaccctgggcgacagagtgagactgtcttaaagataaaaaaaaaaaaaagcaggtttttggccgggcgtggtggctcatacctgtaatctcagcactttgggaggccaaggatggtggatcacctgaggtcaggtgttggagaccagcctagccaacatggcaagaccccatctctactaaaaatacaaaaattagctgggtgtggtggcgtgtgcctgtaatcccggctacaggggaggctgaagcacgagaatcgcttgaatgtgggaggcagaggttgcagtgagctgagatcatgccactgcactccagcctgggcgacagttgagactctgtctcaaaataaataattgtgaaatgctgcagagtgctagggaatagggagtgagcattcgtcaagggctatggggtgggaggtcctgagaaggtgccatttgagctgagagctggagcatgtgcaggagctggccatggtcaagctgtggcaagagggctcagctaaggccaaagccgtgtgatgggagcaaacctgaagccaggacttgctccttctgccggttctctgtgaggggaatcatatcggttccctagggctacataacgaatgaccacaaactgagcggcttaaagccacaggaatttattctctcaccgttctggaggccagaagtctgaaatcaaggtgttggtggggtcacgccccatctgaaagctctttgggaggatccttcattttctcctcatcttctgggggctctgggcgttccttggcttggggtcacaccattccaattcctgtctctgtctgcacatggccttcttggattctgtgtgtcttctcatcttatataaggacgccagtcattggatttagggcccacactaatccactatgacttgttcttaactaattacatctgcaaagaccctatttccttccttccttccctccttccctcccttccttcccttccttccttcctcccttcctatactttcttttcttttcctttccttttctttctttttttgagataggatcttgttgtgttgcccaggctggagtgcagaggcatgatcgtggcttactgcagccttcagctcccgggctctatcaatccccctgcctcagcctcctcagtagctgggactacaggtgtgcaccaccaggcccagctaatttttttttttgagttggagtttcacccttgttgcccaggctggagtgcaatggcgcgatctcagctcaccacaacctccgcctcctgggttcaagtgattctcctgcctcagcctcccaagtagctgggattacaggcattcaccaccacgcccagctaattttatatttttagtagaggtgggatttctccatgttggtcaggctggtctcgaactcctgacctcaggtgatccgcctgccttggcctcccaaagtgctgggattacaggcatgagccaccgtgccaggccgctaattttttatttttggtaaatacgaagtttcactatgctgcccaggctggtctcaaactcctgggctcaaccgattgtcccacctcagcctcccaaagtgctgggattacagccgtgagccaccatgcctggccattttctgttgtttataagcctcgagtttatggtgttttgtgatagcaggctgcatagattaacacagggaccttggacaaagcagagtggtctttccaactatggatacgattgtgtccctccccagctcacacaccctccttggctccccaatgccctcagtgtggagctcatactcctcaggtcagcattcagggcagtcagcccctgcgtttacttcgtggctcaccttagcattgcctcagctcactgagctagactctgcacaaacacgaggcaccgagacatggacgccatctcagagcagaccagggcccctggggcgcctctcagtgggatagggctgcagctttctccttgatccaagtgcttttgagttaaatctgctgccaacgactccaccattcacaggccagggcatctactgtgcgctagccacaggtgctgggcctgggcaagcctggcccccactccctgtagtggggcaggtgcaggcgggggtggctgctcggaggaggtggcctgagggatgtatatgagtttcccaggcagccttaggagggagggtggggatggagaaggttacccttctccatggagggtggtgaggggctgagttttatcccaagggccgtgggaccctggaggctttgaaacaggacaatgggctggctagacaggtgcaggctatggccaggaaaccccccaaatacaacggaattgaaagactcctgttggaatgctggcccccgcaggaaccaccatgatcccgattcacccaggagggccaccctcccgtccagccccccaagagcagcagggctccctcttgcccttgaacctcctctgccctgacaggcggcgtcacccagggctcaggatcctggcttccagcattccagaggtgactcaccaaccaaagtgtcactcaccaaccgaaggaccttgcacaaatgcaccagcctccccatgcctcagtctccccatctgtaaatgagtgttatgacggtactgtcataaactccctggaggatccaggtggtcacgttactgttggtgacattgtccctctgttggctgcagacgcatcttctctccagactgccgatcccagaaagccaggtgatcaccattaaccccgagctgcctgtggaggaggcggctgaggactacgccaagaagctgagacaggtgagccccgaggagcggccgcaagggagtcacatccacgaagcggccacaccccgggcaacagagcggccttctgattgtcaccagcaggaactgccccagggatcactggcagatccctttgaggaatcccctcttcgaggccacagccctgccctggggagcctgaaggccactcggcctctgttgcccaggtaacaggcctgggtcctcacatcttggggaaatatgatgggtatggctatggctttgatcacaggctacattgagcactgtttcctgcgttacagctacttgtatttctttttttttttttttctttgagacggagtctcactctgtcgcccaggctggagtgcagtggcgtgatcatggctcactgcaagctccgcctcccgggttcacaccattctcctgcctcagcctcctgagtagctgggactacgggtgcccgccaccacgcctggttaatttttttgtatttttttagtagagacggggtttcaccatgttagccaggatggtctcgatctcctgacctcgtgatccgcccaccttggcctccaaagtgctgggattataggcgtgagccaccatgggccttttttttttttgagatggagtcttactctgtcactctgtcacctaggctggagtgcagtgatgcaatctcagctcactgcaacctctgcctcccgggctcaagtgattatcctacctcagcctcccaagtagctaggactacaggtgcctgccaccacgcctggctaatttttgtatttttagtagagacagggtttcatcatgttggccaggctggtcttgaactcctgacctcgtgatccacctacctcggcctcccaaagtgctgggatttcaggtgtgagccaccatgcccagccacagctacttgtatttttttatctgacaactgtttctgtgtcctctgagtctcccctgcccctgccacctacaacctctcaaggctgtcttctccccacgcccaggcattccaaggggactccatcccggttttcgacctgctgatcctgggggtgggccccgatggtcacacctgctcactcttcccagaccaccccctcctacaggtgagcacaccaatgcggggttccaccctagtcctgagcccagtccctaacatctgggacttccagagggagagccacctgccgggtggggtgtctagagccagggttcaagtcagcctccaccaacatacctgcctgctgggctcaatcctttcaggtctcagttgagccccttaaaacagggaccttaaactacccaccatgggattgttagtaggatgggatggaacagtggctggaccaggcctggtgtgtgtaagtgtccaagaagctgaagtgacattgtccttctgcctccatccctgggcttcctccccaaggagcgggagaagattgtggctcccatcagtgactccccgaagccaccgccacagcgtgtgaccctcacactacctgtcctgaatgcagcacgaactgtcatctttgtggcaactggagaaggcaaggcagctgttctgaaggtaacagctgagggttctagtcctgggaagttcatgggcatgtgggccccagggacagaaaatggccccagacattattgtgctgaagcatcagatctgaagaaaactcagtcattcttgggttgaaaggtaacttgaaattgcaattagaaaaaaaggaaaaaaaaaaaaaaaaccccagaaaattgcaattaaaggctagttaggtattaaccgctatgaaatgaaattgatgagatgaggccaaagctgcattcagaggtaaattaatagcattcaaatgcatttaaaaaaaattattaagtagcaaactattgaaataaatcaagtgctttcctgtagaattagaaaaaggacaataatataaatctacaaaagtcagtggcaggactaagtgaaattaaagtcagaaattaatgagttggttaatatattttaaactttaatggtaagtagatctaaaagatagaaaagctcctgacaaggctaatcaagagaaaaaaaaatcacgtggtattatgaataaaaaaaggtactgttatgtaaagtattttaggaaaatacaaattcattacagcattaaaaataaactaaataattaaaaaggttttagttgccttcattgaaaagaccaacaactacagaagaaactggaaatatatttttattttttttttgttttttgtgttattgttgttgagacagagtctccctctgtcgccaaggctggagtgcactgatgtgacctcagctcgctacaatctctacctcccaggttcaagcggttctcctgcctcagcctcttgactagctgggattataggcgcctgccaccaggcctggctaatttttgtatttttagtagagagggggtttcaccatgttggccaggctggtctcaaactgctgacctcatgtgatccacctgccttggcctcccaaagtgctgggattacagatatgagtcaccgtgcctagcctggtttttacttttctaagtggttggaaaaaagtcaaatgaagagccaggccatgcttatcatcccatctactcaggaggctaaggcaggaggattactcgagctcaggagttcgaagctatagtgaaatgtaattgcaactgtgaattaccactgcactggggaacatcacgagaactcatctccaaaaaaaataaatcaggcggggcgcggtggcttatgcctgtaatcccagcactttgggaggctgaggcaggcggatcacctgaggtcaggagttcaagaccagcctggccaacatggcgaaaccctgtctctactaaaaatacaaaaattagccaggcgtggtggcgtgcgcctgtagtcccagctactcaggagcctgaggcaggagaatcacttgaacccgggaggcggaggttgctgtgggccgagatcatgccattgcactccagcctgggcgacaagaacgaaactcagtctcaaaaaaaaaaaaaaatcaaatgaataatactccttgaccttgtgaagattctatgaagttcagattacagtgtccagaaattgttttgtttgtttgtttttttgagacagcttctcaccctgtcatccaagctggagtgcagtggcgccatctcagctcactgcaacctccacctcccgggttcaagtgcttctcctgcctcagcctcccaagtagctgggattacaggcacctgccaccacgcccagctaatttttgtatttttagtagagacagggtttcacaacattggccaggctggtctcaaactcccaacctcaagtgatccgcccccctcggcctcccaaagtgctgggattacaggcatgaaccaccgcacccggcccagaaaagttttattggaacatagcaacacccgcttatgtatatattgtctgcagctgttctggggccagaactgcagagctgagtggttgcaatagagactggatggtctgcagagcttaatctattgactctggtcttttgctgaaaaagggtgccaaccgcagtattaaacagttacagaccaggcacagtggctcatgcctgcactttgggaggctgaggcaggaggattgcttgagtctaggagtttgagactagtcttggcaacatagcaagaccctgtctctacaaaaaataaaaaattagctgggcacagtgccatgtgcctgtggtcccagatacttggcagactgaggcaagaggatcacttgagcctcagagattgaggctgcagtgagccttgatgccgtcactgtactccagcctggatgacagcgcaagaccttgtctcaaaaaaaatgcaaatagttacagtgggcggggcatggtggctcaacgtgggagttcaagaccagcctggctaatatggtgaaaccccgtctctactaaaaatataaaaaattaggccaggcgcggtggctaacgcctgtaatcccagcactttgggagacctaggcgggtggatcacctgagttcaggagttctagaccagcctgaccaacatgatgaaaccgtctctaccaaaaacaaaaaaattagccaggtgtggtgggaggcgcctgtaatcccagctacttggggggccgaggcaggagaattgcttgaaaccgggaggcggaagttgcagtgagccaagatcgcaccatcacgccatcacactccagcctgggggataagatcgagagttcatctcaaaaaaaaaaaaaaaaaaaaaaaaaacttagccgagcgtggtggcacttgcctgtaatcccagctactcaggaggctgaggcagaagaatcgcttgaaaccgggaggcggaggttgccgtgagccaagatcgtaccactgcactccagcctgggagacagagtgagactccatctcaaaataaataaataaataaataaaaatagttacagtggatagaaaggaagggactcttgtccctgctgtttggcactaggacagctgagctgggcattgtcacattttgaggatacaagagtcttatttatccttggttggggagccaggagagtgccgaggggcggtgcctgggccgcaggcagggccttactcttctgccctcttcttcagcgcattttggaggaccaggaggaaaacccgctgcccgccgccctggtccagccccacaccgggaaactgtgctggttcttggacgaggcggccgcccgcctcctgaccgtgcccttcgagaagcattccactttgtagctggccagagggacgccgcagctgggaccaggcacgcggcccatggggctgggcccctgctggccgccactctccgggctctcctttcaaaaagccacgtcgtgctgctgctggaagccaacagcctccggccagcagccctacccggggctcaacacacaggctgtggctctggacatccggatattaaaaggagcgttgctggaagtctgcactgtctcgcggtgtttgatggcagcaggcctgggggcgccctggcctgggttctgatccatagccctcatctgtggggaggaaggcggggcctgcttccctggggcatagccaccatggatgaatttcctaagacaacaggctgggcacagtggctcacgcctgtcatcccagcacttcgggaggatgaggtgggcaaatcacttgaggtcaggagttcgagactagcctggccaacatagtgaaatctcttctctactaaaaatacaaaaattagctgggcgcggtggctcacacctgtaatcccagcactttgggaggccgaggctggtggatcacgaggtcgggagttcgagaccatcctggctaacacagtgaaaccccgtctctactaaaaatacaaaaaaaaattagctgggcataggtggtgcacgcctgtagtcccagctacttgggaggctgaggcaggagaatggcataaaacccaggaggcgaagcttgcagtgagctgagatcgcaccactgcactccaacctgggagatacagcgagactccatctcgaaaaaaaaaaaaaatacaaaaattagccgggcgtagtggtgtgcacctgtaatcccagctacttgggaggctgaggcacaacaattgcttgaaccagggaggcggagcttgcagtgagctgagatcgcgccactgcactccaccctgtgtgacagagcgagactcggtctcaagaaaaaaaaaagctgggcacggtggcttacgcctgtaatctcagcactttggaaggctgaggtgggcgggtcacccgaggtcaggagtttgaaaccagcctgatcaatatggcaaaaccctatctctactgaaaatacaaaaattagctgggtgtggtggcatgcgcctgtaatcccagctacttgggaggctgaggcaggagaattgcttgaacccaggaggcggaggttgcagtgagccaagactgcgccactgcactccagcctgggcaacaagagcgaaactccgtcttaaaatgaaacaaaacaaaacaaaaaaacaaatgtattctgtcttagctatagagatcagaagtccaaggtcaaggtggcggcagggctggttccctctggaggctctgaggcagaacccatcccaggcctctcctgtccttggcattccttagcttgtggccatatcactccagtctctccttgtcttcacttggacttctttctcttgtgtgttctcgcctcctatttatttttttgatacagggtctcgctctgtcacccagactggagtgcagtggtgcaatcacagctcactgcagcctccatctcctgggctaaagcgatcctctcacctcagcctcccaagtagctggtgctacagatatgcaccaccacgcctgcctacttgtacaaattttttgcggagacggggtcttggtatgttgcccaggttggtctccaacccctgagatcaagcgatcctccagcctcagcctcccaaagtgttgggattacaggcatgagccactgtgcccagcattcttttcttataaggacacctgtcattggatttaggatcgccttgcacccagggtggtttcatctcaagataccaaatgagtattccaaataagttccaaataaatgcttatttggaataagtattccgaataaggtcacatgctgagtttcctgggtcaggacgtagacatgtcctttgggggacataagtcaaccctctgctgagctccagctgcactgacagggcgaagcactgcattcagccatgctgcggacctgctcagagccttgaaagcaccagagagtctagtctccatgtgctgggctcctgcacattttcccagaatgcatctgctcatggcccacccttcagctttctctaggccccagggacgacagtgtgggaggctggtgggtgcatgggggctgcccagccacgtgcaagtttctgtggggggatccagaggaggcacccggctgagcaggagatgggaattgaaacctgcgcagaggcggctgtgcagggtgagagtggagccgaaaccacagaaagtgaagtttgcttcaacgtcttgtcccggcaggccactcagatgtgagagtgaggaagtgggatggggcctgaccggaaggaggttggtaaacagcaaagagagctgagcggaagctcagctgtggggctggttgagggcaggaggccgtggcccccagagcggcaggcacggggctgcgaagtgaagggaaattgagctgccagcacagggaccccacatggatggttgtgcctggggctgtcaccatctcctactctttgcgagagtgacaactcttcctgctccttttgccttcggagtgaaattcacccttcccacaaggctccacgtggcccctttcacctctccctctccccagcaacatcagcccctcactcagtctccctgcagcgcacccacttcctgctgttcctggagcccgctgagcacattcccaccccagggcctttgcctgtgctgagcccgctgcccggtatctcctttcctgcagctttttgcatggcttgggccctcgctttcttttttggggggacacggtcttgctctgtcgtccaggctggagtgcagtggtgtgatctcagctcactgcaacctctacctcacgggttcacacaattctcctgcctcagcctcccaagtagttggttctacaggcacccaccaccactcccagctaattttggtatttttagtagaaacattgagtttcaccacgctggccaggctggtctcgaactcctgacctcaagcgatccacttgcctcaacctcccaaagtgctgggattacaggcatgaaccactgcgcccaactcctcgcttcctttcatctccgtgacccctccatgcccatcctctatcccctcctgctgcatttttcttccttgcccgtctcatcatctgatggttttcttttttcttttttttgagacagagtctcgccctgttgctcaggctggagtgcagtggtccgatttcagctcactgcaacctccgcctcctgggttcaagtgattctcctgactcagcctcctgagtagctaggattacaggcgcccaccacaacgcccgctattttttgtatttttagtagagacagggtttcaccatgttggccaggctggtctcgaactcctgacctcaggtgacccgcctgcctcggcctcccaaagtgctgggattacaggcttgagccacaacagccagctgaaaaaacataaatttttttaaaagaagaaatgaatcctgggctgttagtgaagattacattcagatattactagaggcttaagcaaaacagaggtttagctctttctctggagagacaccattcagggctggtagagcaatgtcacacattcttcaggaaccccagctccttctacatcattgctttgccctgtcatcagctggattctgcctcatggcccaaggtggctgcttgtgctccagccattgtgtccacgttccagctctagcatgaagaagcttcccaggattcaccgaagacacttctgctcactcctttatggccagcctgggttgcacagccccacatagcagcaaggaagtctggaagatgagtctccattggacagccatgggctccgttatgatcagggattctactactgaggccaataggagcaatggacattgagggacacgtgttctctattcatcgatgacctgcccgcctgcctcaggggctccctggggatcttgccatctgaggggccacactctggactttccttcctccagcctggagcccctgactgctgggaagtgttcagtgtccttgagaggtcttcagggacccaccccactccccagccaacgctggatccagagctcagtgcttgacactcccctcatcagaaaacctgtgatggctccatttgatcacatttccgcttggagtgtagactgcatgccctccctccctccgtccctcccttcattcattcattcattcattcattcattcatgcacacgtttattcatgcattcattcagcaaacatcgagggctgctctgtgccaggcacaaaacaggtgaaggggtggagacgcccaactaaccaaaccaggtcaaatgctgggacataaaggtcgcgcccaaccagtccaggggcacagggacggctctccaaggggctggtatctggtcttttcacctgaggggtgaagcttgggcgaccacgtgcaggaggcgggagcaagagttctctaggcactggacaagaccgcgggggtcagagggacatgggggcttcgggagctgcagggggctgagtggagccagagggctcttggagcgatgaggctgggccctcagtggtgctttcccaaagggcaatgggagagcttcgggaggtcagcacggagagttttggggtgctaaagatggggtttgggcccaagaaaagggacaccttcgctgggtgacgtggctcacacctgtaatcccagcactttgggaggctgaggcgagaggatcacctgaggtcaggagtttgaggccagcctggccaacacagggaaaccccatctctactaaacaaaacaaaacaaaattagccagaaatcgcttgaacccaggaggcgaaggtggcagtgagccaagatcatgccactgcactccagcctgggcaacagagtgagacaccgtttaaaaaaaaaagaacactttaggaggtcaaggagggtggatcacgaggtcaggagtttgagacaagcctggccaacataatgaaaccccgtctctactgaaaatacaaaaaattagccaggtgtggtggcgggcgcctgtaatcccagctactcgggaggctgaggctggagaatcacttgaacccgggaggtggaggttgcagtgagccaagatagtgccattgcactccagtctgggcgacagtgcgagagtctgtcccaaagaaaaaaaaaaggacacctttaagagacacttaaaacgtgaaatatgccaggtgtggtggctcatgcctgtaatcctaacattttgggaggccgaggtgggcggatcacttgagtccagaagtttgagaccagcctgggcaacataggaagaccccccgtgtctacaaaaaatacaaaaattagccaggcatggtggtggcgtgtgcctgtgggcccagctactctggaggctgaagtgagagggtcacttgagcacaggagttccaggctgcagtgagccatgatcgtgccactgcactccagcctgagcaacagagcaagaccctgtctctaaaaaaaaaaaaaggaaaaagaaatggagtccaggtgatggactggtgggagggacagtgttgggggcctgaagaaggaatcaaggatgaagcttcagtgcccccaagtctctctgctcacccctgccaggccacccatcctctaagaccttggcatctgcccccctgccccagcactgacctcagggacagtctgggagtgcctgtccagctctgtctccccagcctggggactcctaggagctgggccagggctgtatcctctctggggtccagcctcaccgggcacagggtaggcacagtgctggtgggggggtgtggcaccaggaactagatgccgcatccctgcccatccccctgttccagcccccatacacaacgactgctggccggtcctgccagatgtctgccctgccaccctcctccaagacgagctatgattttctttctcccacaccccacaacctaaccccggggctgtccccgcagcctctacagaaaccactggctctgggcaacacgggccccaggggagtggggaggacgcaggtgcagcgtggggtggggcaggggcggggcctctgaacccactgtgaccaagcctctcacccgccatccaggtgcccctgagccgaggaacgcaggcggtggtcgtggggaagggaagaggagccccgggagacgacagcagcatgggtgggcggccttcgagccctctggacaagcagcagcggcagcacctaaggggtgagcagccggggaggggacagggtgggagtccaggtgggtgggggctccagccattgggtccacatgctccatgcagcagatggggttcggttcagacctagggctgtcaaaacacacaggatgccttcttaatgtaaatttcacgcagtgaatctttttttattgttgagacaggatcttgtctgttgcccaagctggagtgccgtggtatgatcgtggctcactgcaaccttggcctcctgggctcaagcaattctcccgccttaacctcccaagtagctgggaccacatgcatgtaccaccatgcccaactaattatttcattggttgtttttttttttaatagagacagggtgtccctatgttggccagtttgcttttgaacttgtgggctcaagcgatcctcccgcctcagcccgaatagctgggaccacaggcgtgcaccaccacacctggctaattttttatttgttttcgtagcgacagggtctcactatgttgcccaggctggtcttgaactcctgagctcaagcgatcctcccacatcaacctcccaaagtgctgggattacaggcgggagccactgtgtccagcctgcatcttatttttagtataagtgtatcccagattttgcatagtgcacacttatgctgaaaaccaattacccctttatggttttttttttgtttgttttgttttgttttgttttttgagatggagtctccctctgttgcccaggctagagtgcagtggcgcaatcttggctcactgcaacctccgcctccaggattcaagctattctcctgcttcagcctcccgagtagctgggattacaagcatgtgccaccatgcctgactaatttttgtatttttagtagagatggggtttcaccattttggccaggttggtctcgaactcctgatctcaggtgatctgctcacctcagcctcccaaagtgctgggattacaggtgtgagccactgtgcccagaagactgtgtcttctatttttatttggtaaatctagtgacctgatttagggcaggggttcaggtgggaggcatagggccaagtggagggtgtcccagacccagccaggccctgagggatgtcttcctgagcgggcagggaccagcaggcccctcggtaggaccctggggatggaggctcagttcccaatttgagactaagaggggccagtgccagattcagtgccattcgggtccctctgtcctcatatgtggggtgagcaactgtgctgggcgctggggacattgtggggttggtattggccttaccctcacaggctcatggtctaaacaccttccctctggtggctctgctatgtggggcttctgtgcccaaggtgacctcatggcacagaacggctgctggagctccagccattgggtctacattccatgcagcagcatggaagagtgtttttttggtttttgggtcaagtcatgacccaaaattgcatggtgagaatgatgggagagagctcacatgttccttgagggtagggaagagcagaggtggatgactgcccactgaggagacaatgatcaagccagggctggagggatgtgatggtgttggaaggaaggagataccagaagagcattttggacaggagaaacagcatgtgctaaggccagtgatgtatcttgcaaacaaacaattcacgttcacaccctggtcattccctcatttgctgtgtgccctttggtgagtgacttcacctccctgggcttcattctcttatatgtaaaatggggatagcaacaacgcctagctcatggggctgggggggcattgtaaggattcaaagagttactctatgtagcactgggatttttttcccccagatagtggcttaaacaagataaggattttttttttttctcctcaaactgagaggtgtggaagcaggcaggctagtaaaagttagacacctaaagtcctttcatctcatggctctgccatgtgtggattcctgtgcccaaggtagcctcatggcacagaatggctgctggagctccagccattgggtccacattccgggcagcagaatggaactatgttttatttacagtcaagtgtacaagccttagggcaacagctcaaagagctagtcacccatcacccatatgactacttcccagatagatcaggatacagcacacctccatcactcacagaaagttcacttgtgtgctttggagctttaaaagcttttgaaaagctccccaggtaaagcatatggggacacttttgggtgtgatggatccgctcatcttgattgtggtgagggtttcacggatgtgtgattgtgtcaaagctcagcaaaccatatgcttacatgatacgtgagctataagtgaaggtgtggctcaatctgtattcccagcgctttgagaaaccaaggtgggaggattgcttgaggccaggagtttgagaccagcctggataacatagcaagaccttgtctctacaaaaataaaaaaattagctgggcatggtggcacgtgcacatgatcccagctactggagtggggctgaggtgggaggatcacttgagcccaggaggtcaaggctgcagtgagctgagattgcaccactgcactccagcctgggggacagacaccctgtctcaaaaaaaagaaaaaaaagtgcaagacaagtggatcactggagctcaggagttcaagaccagcctgagcaacatggcgaaacctcgtctctactaaaaatagaaaaattagtcagtcgtggtggcagaagcctgtagtctctgtagtcccagctacttgggaggctgagatgggagaatcacctgagcccaggaagtagaggttgcagtgagctgtgatcgtgccagcgcactccagcctgacaacagagtgagactccatcaaaacaaaaaacaaaaaacaaaacaaaacaaaacaaaaaacccgtctctactaaaaaatacaaaaattagcccagcatgatggcgtgcgcctgtagtcccagctactcgagaggctgaggcgggagaattgcttgaacccaggaggcagaggttgcagtgagctgagatcgtgccactgcacttcagcctggcaacggagcaagactccatctcaaaaaaaaaaaaaaaaaaaaaaaaaagaagctccctcacccagccacatggatggaaacaggcatggagggtgaaggatgaatgaaatttggtgacaacttgtctggaagctcaggatgactacaggagcccccaggtggcttccctgtctgttttgccctccccaagcaggtctcctgggcagattcaatttgctgggttcactgtccccttgtccctgcaggtcaggtggacaccctgctgaggaacttcctgccttgctaccgtgggcagctggcagcgtctgtcctgcggcagatctctcgagagctgggccctcaggagccgaccggaagccagttgctacgcagcaaagtgggtgttgtgggggcagaggacgtttgagtgttaggggagggtcctggaggagccctccctaggccatgcttccaacctcagacctttgccattgccataggatgactttaaatatgcattgtttaaataaacattcactgagcagccaagcaaggtggctcccgtctgtaatcccagcactttgggaggccaaggcaggcggatcaccagaggtcaagagttcaagaccagcctcgccaacatggtgaaaccccgaaaccccatctctactaaaaatacaaaaaaaaatttagccagaccctgtagcgcgcacctgtagtcccagctacttgggaggctgaggcaggagaatcgtttgaacctgggaggtggagattgcagtgagcccagattgtgccactgcattccagcctaggcaacagagctagactctgtcaaacacacacacacacacacacacacacacacacacacacacacacacaaccattcactgagcatgtaattcatgccacatcatgggctgggcatgaggacacacagcccttgtccagtgacaaggacagatcctgcggtaacctctggggttcacaacctgatgggaggtagaagactccaaacaagttagcatatcatgatgtggaatggagtaacattttcttttagatggagttttgctctcttgcccaggctgtagttcagtggcgcaatcttagctcactgccacctccacctcccaggttcaagcgattctcgtgcctcagcctcccgagtagctgggaccacaggcgcccgccaccatgcctgggtaatttttgtatttttggtagagacggggtttcaccatgttggccaggctgatctcgaactcctgacctcaagtgatctccccaccttggcctcccaaagtgctgggattacaagcgtgagcgcctggcctccagacatctctggagccatgaggttgtgtgccccacacacctcactcagtcttcacccctttggtagacaggtctttgactgatgaggaaactgaggcacagagaggccaaatggccttctcgaggtcacactacagaggtgtgatttcaacctgggatccacgcttattactaatgcttggtcccacgctccagttggggctgagattttttgcctctccggaatgccccacttcccagctgtgcccacccagggcggggggctccaggagctgtggacacagagccccttcctgcctaggactctctctgtccagcctggggcatcacgggaccttagcgtcaccccaggatacagcgggtgtctgggtggtcgggccacagggacatcagcccacagccccctgacacccactgctccctctttctgcagaagctgccccgagtccgtgagcaccgaggacccctgacccagcttcggggccacccaccccggtggcagccgatcttctgtgttctgcgtggggacggccgcctagagtggttcagccacaaggaggtgcgtgattggcacgtggcctttctacttctgggtccctccttcccacccccgtcagcctcaaggtttgtgggatccatatctcagcatagccccacctctatcaatcacccaggatgaatcttgtgcccctatgtgtttggcctgttgtaggcaaccatctcgtcccatcccctgctgtgctgggtgggtaaactgaggcccaggccagggatagggtcgtggtcagtatcagagctgtggtttcaacctcttggggcctttgcaagtcacacctctggccgctctgctttctggctggggagcttggagcgatcactacctttctgaaactcagtttccacttctgtgaaatgggatgtttcacaccatgtagggctttgagggttcaacaagagggtcctcagacagcacttgggaccggaccggcacgtggggagcccgtgggtgctgggagctcagggactgagggaggaagggagggaaaggggaaagggaaggagggagagagagggcaagaacaggagggaggaagggagaaagttatgggggcagaggtaggatggatggagggagagaggaggaaaaaaaaagggagggagagccgggcctcgtggctcacgcctataatcccagccctttgggaggctgaggcaaatagatcccttcagcccaggagttcaagaacagcctggccaacatggtgaaactccgtctctactaaaaatacaaaacctagggccaggcacggtggctcaggcctgtaatgccaacactttgggagaccaaggcaagtggatcacctgaggtcaggagttcaagaccagcctgggcaacatggcgaaaccccgtctcaattaaaaatacaaaaattagcctgctgtggtggcgggtgcctgtaatcccagctactcgggaggctgaggtggaagaatcacttgaacttgggaggtggaggttgcggtgagctgagatcgcgccatcgcactccagcctgggtgacagagtgagactctgtctcaaaaacaaaaaaaaaaaaaaagagagagggaggaatggaggaaaggagagggagggaggggtgggaggggcagaggatttttcagctcatctgaaatcttcccttgatggtatagttgggacacagaagccacagttcagacctgtcccaggttggttctctgggtaccttttgtaggaatatgaaaacgggggccactgccttggctcaacagccctgacaggatacacgctcctgacttcccagcgagaatatctccgccttttggatgctctctgccctgaatccttgggtaagggtcccggggttcccaggaacaggtttctccaccccagcatcattaacatgtggggccagatcattctctgcggtgggggcgtcccgtgtacagcagggcagtaagcagcatccctggcttccacccactccctgcctgcagcagcccccaccctgggtgcgacaaccaccaatgtctccagcattgccaagtgtctcccgggggcagcgttgctacgggtgagcatccctactctggaaaacaaacaaacaaacaaacaaacaaacacccactcttgcaagggtgagggggagagttaggtcatgggaccagaatcagaatagcaaaggataaaaacagtaaaatctgggatgggtgcactgtctcatgcctgtagtcccagctactcgggaggctgaggcgggaggatcgcttaagcctgggaggtggtggcagtgagccgagattgccccactgcactccagcctgggcaatagactgaaaccccatctccaaaaacaacaacaaaaacaattaaaaacaataggctgggcacggtggctcatgcctataatcccaccactttgggaggccgaggtgggcggatcacttgaggtcaggagttcgagactagcctggccaacgtggtgaaacctcgtctctactaaaaatacaaaaattagccggtgtaatgacatgcgcctgtaatccgagcactttgggggaccaaggcaggtggatcacctgaggtcaggaggagacctcatgaggccagcctgaccaatatggtgaaaccctgtctctactaaaaatacaaaaggtaggccgggcgtggtggctcacgcctgtaatcccagcactttgggaggctgaggcgggcagatcatgaagtcaggagatcaagaccatcctggctaacatggtgaaaccccatctctactaaaaatacaaaaaattagccagttgtggtggcgggcacctgtagtcccaactactcaggaggctgaggcaggagaatggcgtgaacccgggaggcagagcttgcagtgagccgagatcgcgccactgcactccagccagggtgacagagcaagactccatctcaaaaaaaaaaaaaaaaagaaaagaaaagaaattagagaaggaacaattccaattccaggcatgtgcctggcaaataactcagcattgggcttgcactatctcataaagtctgcccagcaggcaggcccatcactaactaccccatttcacagataaggacattgaggctgaggattgtcacacagtcaagggcagagctagaattgcaccctctgcttcacctaaaagctatcttgctgtcaaaggacacaaaaatgtagtctgctgagatgttgatgctgctcaaaacatcagaatctgcccaaatacccatctcttgagggttgattaaatatattatggcctggcccttggtaatgaacagtgagctggctgtggcggcatatgcctgtagtcccaggtacttgggaggcagagacaggaggatcccctgaggccaggagttccagaccagcctgggtaacatagtgagacccccatctccacaaacattttaaaaaataaaattacctaggtgtggtggcatgtgccggtagtcccagctactcagaaggcagaggcgggaggatcacttgagcccaggagttaggggctgctgtgaactatgatcacaccattgaactccagcagcctgggcaacagagccaggagctgtctctatttaaataaataaataaataaataaaaacctgggtgcggtggctcatgcctgtaatcccagcactttgggaggccaaggcgggcagatcacctgaggtcccagcctggccaacatggcgaaaccccacctctactaaaaatacaaaaattagccgagcgtggtggcacacgcctataatcccagctactcaggagaccgaggcaggagaattgcttgaacctgggaggcagaggttatagtgagccaagacagcgccactttactccagcatgggagacagagcaagactctgtcaaaaaaaaaaaaaaaaagccaggtggctcacgcctgcagtctcagcactttgagaggccaaagtgggaggatcactcgagcctaggagtttgaggccaccgtgagctatgatcacaccactgtattccagcctgggcagcagaggaagactccatctctgaaataaaaataaattaaaatttaaaaacaataaataaaagaaagcaaaacttagccactgaaagtgtcccagacgtatcaaggagcaaaatgaccagttccaaggcagaaaatcccatcttgtcacagatatgcacctcacacagtttcacgcagattttagaatctggagaaatgtcccctaaactattaacagtcattatcgtctctgggggctgaggctggaagactgagatgatcaggagcttccaccttctggactattgatttccttttcttttcttcttctttttgtttttggacagagtcttgctcttgctctgtctcccaggctcaagtgcagtggcatgatctctgctcactgcaacctccgcctcccaggctcaagtgatcctcctgcctcaacctcctgagtagctgagaccataggcacctgccaccacaccctgtaaattttgtgttttagtagagacggggtttcaccacgttggccaggctggtctcgaactcctgacctcacgtgatccgcctgcctcaggctcccaaagtgctgggattacaggcatgacccacctcgcctggcctggattgttgggttttatcgcagtctgtgtttatcatcctggaaagtggaacaaaacactggagacaggataccctaaatatttcttttcatatacttatgtttttaataaaaaatatcttgtgcaggctggtctggaactcctgggcccaagggatcctcccacttcagcctccaaaggtgctgggattacaggcatgagccaccgcggctggtccccaaataaattaaccaaagctgaattcacttattttgtcttgtcaataattctaggtcatcggtatcactgttaaccccatttgggcaggaaaatcacagctcatagagctgtgtgccctagtcatagagctagaaagtagcttggccaggctgggcacaatggctcacacctgtaatcctagtactttgggaggctgaggcaggcagatcgcttgagctcaggagttcaagaccagcctgggtaacatagtgagaccctgtcccttttgttaaaaaaagaaagaaaatgaaagtggtttggtcaggttggaacccgggtctgactgactccaaaaccccacataaagccggacgactcagataacatcccagcttgaatggattggtggtggctgccaggaggactgtattaaggatgctaaggctggaaaacagttctgggatggattggtgatgtctgccttgggcatgcagtggaagaaggtgaccctgcctcccccaaaactgtgccccacccagtgctgttggaataaggatggtggcaagtatcgtggtatgactcatatttatcgagcaactgcccatgccagggactgctgtatgcatttcaggggtattttctcctagtgaatgaacgtctagaagatgcgacctcctgtttgttttcaggagaccatactcaggaagagcctgactccctcttggaagtgcctgtgagcttcccgctgttcctgcagcaccccttccgccggcacctctgcttctctgcagccaccagggaggcacagcatgcctggaggctggccctgcagggtggcatccggcttcagggcataggtgggtctcaggacgggtcagacatttgtggggctaatggtctggggtcagatggctcagcctctgttggctcgggacctctccaggcctcactttctttacccagaaaatgggtttttaggccaggtgtggtggttcatgcctgtaattctagcattttgggaggccgaggcaggcagatcacccaatgtcaggagttcgagaccagcctggacaacatggcgaaatcctgtctctactaaaaatacaaaaattagctgggcatggtggaaggcacctgtaatcccagccactcgggaggctgaggcaggagaatcacttgaacccgggaggtggaggttgcagtgagccaagatcgcggcactgcactccagcctgggcaacaagagcaaaactccatcacacacacacacacacacgagaagaaaatgggttgttgggggagccagaagggacaccaggcagttgtgagtgactagggctgtaacagagacacacagggtgctatgggagctcagcctgagggatgggggttagagcaggcttcccagatgaggggaagctggggtctgtaaaagatgaaggactagccgctgggcgcggtggctcacacctgtaatcccagcactttgggaggccgaggcgggaggatcacgaggtcaggagattgagaccatcctcgctaacacggtgaaaccccatctctactaaaaatacaaaaaattagccgagcgtggtggcaggcgcctgtagtcccagctactcgggaggctgaggcaggagaatggcatgaacccaggaggtggagcttgcagtaagccgagatggtgccactgcactccagcctgggcaacagagtgagactctgtcttaaaaaaaaaaaaaaaaaaagatgaggggccagccagatgaagaaggggaataggtcaggcacagtggcgtggtggcatgagcttgtggtctcagctactcaggaggcttaggtgggaggatcacttgagcccaggacttggaggctgcagtaagcaatgatcatgctaccgcacttcagcctgagcaacagagagaccccctgagaaagagagagaaaagaaaagaaaagaggagagaagagaacagaagaaagaaaagaaggaaaaagaaaggaaagaaaaagaaaagaaaggagaaagaaagaagaaagaaagcaagaaagaaagaaagagaaagaaagaaagagagggagggagggaaaggaaggaagaaagggaggaagggaaagagagaaagaaaaaagtaggggagcagcaggactgacacacacagttgggcaggttgttgactgcacaaacgatgcaactagaggaacagctagtggctgcagtatgtatggcctgaactgctggtcacggggctgtggctgccagtagagggttccttctaagttgaataaacatgatggtcttgggggactgtgttccctgtggagggcattgcctatgcaaagttccagagatgggtgagacttgggtgttggggacctggccaggcggagggcttcctccccgggccatcgggagccaggcaggggagctaccagcaggcactgaggagcagcccctctcagtcctgcagcgaagccaggcccctgctgcccgggccttcctggacgccgtccgactctaccggcagcaccaaggccactttggcgacgacgacgtgaccctaggctcagacgccgaggttagtgccccgcgaggccgcacccgggacccccaggaccctcccggccgaccgcggcgcccatggccccctctcctgcaggtgctgaccgcggtgctgatgcgggagcaacttcccgcgctgcgagcccagacccttcctggcctgcggggggcaggccgcgcccgcgcctgggcctggaccgaggtatgcacggcgtccggatccgggatagggggcgggatgcgggcgttcgggttcccctcccacgactgtcgcctaaaccctctcccgatctctctgacccccatccccgccccgtgtctcggctttgtcccccctcgaccggtctgggcagcttctagacgccgttcacgcagctgtcctggccggggcctccgccgggctctgcgccttccagcccgaaaaggacgagctgcttgcgtcgctggagaagacgatccgcccggacgtggaccagctgctgcggcagcgggcgcgtgtggcggggcggctgaggagtgaggccctggggcggagcctgggctgggaggggcgaggcgatgctggggaaaaaggggcgtgacctaagcgaagaatgggcttgaagttatgtaaaatgggggcgtggtcagagaggggcggggccaagcataggatgtgcaagggaacgggtggggaaggggcggggccaaagcgaggcggtgggcgtggtcttgtggtcgaggcactgggggcggggcctagagtctgtccggaggaaaccaggtcctaagggggctgcttggatacaaaaagggcggggcctcagcgggggataggcgtggccttgaggctgaggctcgaggagttgaggcccagagccgggccaatgcgggtgggcgggcctgggaagtagaacagcggaggaggggcgggggtaaaggctgatacatgggcagcggtgggccaaggtggcccctacaaagacccaggtgggaatcctgactgggcccgcccctccgaggctcagttttctcatcattacaatgggtagaagagggcgctcagcgtccctgctcgcgtccccctcgcgagggcccctgcacatccccatctgtgaggcaccttgcggaggggactccagaccagtgtcttccactcccagcggatatcaggggaccgctcgagtcgtgcctgcgccgggaggtggacccgcagctgccccgggtcgtgcagaccctgctgcgcaccgtggaagcctcgctcgaggcggtgcggaccctcctggctcaaggcatggaccgactgtcccaccgcctgcgccagagcccctcaggcacgcggctgcgcagggaggtgagctcccgtgggtaggggttcagtgagccagagggtgatgtgttaacttgagtctttcctgtggagaatcttcactgaatttgttctaggctgctttttacttattgtggacccatcaccatgctatggtcagtggagcacagtttttgtttgttttttgtttttgagacaggggtgtcgctctgtcaccctggctgaagtgtagtggcacaatcttaactcactgcagcctcgacctcccgggcttaatcaatcctcttactttagcatcccaagtagctggaaatacaggcgcacgccaccaagcccagctaattttttaatttttttgtagagatgggggtcttgctttgttgcccaggctggtctcaaactcctgggctcaagcgatctgcctgcattggcctcccaaagtgctgggattacaggcttgagccaccgcactggccatggaacacagtttaaaacgtgaggggaaaggagttggatgagaaaagtggcaatttagcaaaatcagtctgaggtcatcccccaaactcctcctcccattcccctgtagggcaacaacccagagaattctgctcaaggcaggtcacctcagtgcatctgatatacaagtagcacctaaaatacatacatacatatatacatacatacatacatacatacatacatacatacatacatagaatagcacctactatgtaccaggcaaccttcaactcattcttaagcctccatttcctaatcaccttctccaggaactgtccctggtcccctctatgtcttgcagtagcctgtgcttctcttatcacagcctgactttcataccactgtgggtgatttctatactctgtctcccctaatttgtaagcagagactgggttagagtattccatttctgcagccccagggcccagcacagacagaacatgagatggtattcacagatctgggccaggaaatgtgctcatttcctctcaattgtgccagcatcgcttgttatagttttttcaggttttatcattttatgtccatgacaccgtgcctcactgctacttattttattttattttattttattttattttattttattttattttattttattttatttttgagacagagtctcattttgccgcccaggctgaagtgcagtggtgcgatcttggctcactgcaacctcctgggttcaagcaattctcatgcctcagcctcccaagtagctgggagtacaggtgtgtgccactacacctagctaatttttgtatttttagttgagacagggtttcaccatgctggccaggctggtatcgaactcctcacctcaagtgatccacccacctcggcctcccaaactgatgggactacaggtgtgagccaccatgcctggcccaccactattgtattatgagtttctttggtgacagctgagacgggatgtattttcatttgtgtttctcctttggtgaattggtaatggggtccctggccctttgcaatcagctgacagcatttttcccccaaaactgcttccgggagcacaggtttactcatttggggagatgccgtgggacttggcgctgatgcagacatgctaccgtgaggccgagcggagccgggggcgcttggggcagctggcagcaccgtttggctttctggggatgcagagcctcgtgtttggggcccaagatcttgcacagcaggtgagggtgagaggaggctgggatgaggccaggctgtgaagacagcctccactgacctcctgctaagtgtgccctggagagaccacgatgatcgagacaactccgcggggctgccagtctcatggggacatgagcccgtgaccaggcagcagccacatgtggtggacagagctggggcagggtgtacagggagcgccaaggatgttcctgatccacctctggggttgacaggactttcaggaggaggggacttccaacatgggagagcaatgggaggaatggcgttgccaccagtcccgagtgaatagtgttgagagtgcttgtctgcatttggggaacgtggagcaatttttcagaaatggggaagataggccggcgacatggacgggcagatcgcgcagtgccttgagcgtggggctaaggggtgagctctttcctgagggcaatggggagccagagcaggtatgtgagcagggggagggcatggctggatttaaggtttaggaagctttgcctgccatagggagcacaggctgttggggacaggaaaagaggaggcagggaggaggcctgcaccaggatgggggatgtcagtggggagaagcaataagtgttttgaagtctgagatgggacctgctgatggacatggtgacagaagaagacagagagtgagatgatccagcactacctggcacagttgttcagtttgtgcactgcacaaaagcactcagtggaggaggctgaactctggctggctccctactccccattctgggcatcctggcaccatctcccagagggaaggggctttctgtcagtttgcacatagtcccccacagactagacaatccccaggtcctgagaggaggggaaaggtgtttcctgggacaaggaggaggaggttgggcagaggtggctggttggaacaggttggatgctgagaaggggtcagctgggcaggagtggggcccgggaggctggagcacagattctggggtcatcatagcatctcctcccacagctcatggctgacgccgtggccaccttcctgcagctggctgaccagtgtctgacgacggccctcaactgtgaccaggctgcccagaggctggagagagtcagggggcgcgtgctgaaggtgtgttctgtgggtacggggtggcatggggtggcagtgggcctgggtgctcagatggttgctggacgcaccgctgggtgtgttgtgcagaaattcaaatcggacagcgggttggcgcagaggaggttcatccgaggctggggtctctgcatctttttaccttttgtgctgagccaactcgagccaggctgcaaaaaggtgagttaatgggaagtgtgcaagagggtctgacagcatcaccatgcatccacttaaagtgggcaagaatgctctttgaggctgggcgcagtggctcatgcctgtaatcccagcaatttgggaggccaaggcaggcagatcacaaggtcaggagttcgagactagcctggctaacatagtgaaaccctgtctctactaaaaatacaaaaaattagccaggcatggtgatgggcgcctgtaattccagctactcaggaggctgaagcaggaaaatcgcttgaacccgggaggggaaggttgcagtgagccgagatcgcgccattgcactccagcctgggcgacagagtgaaactcagtctcaaaaaaaaaaaaaaaaaagaatgctctttgatcattagagaccatttgaccttaatcctagcactttgggaggccaaagtgtggggattgcttgaggccaggagatcagtctgtacaacatagtgaaactccatctctataaaaatacagaagttagccaggcgtgacagcatgtgcctgtggtcccagctactctggaggccaagaggtgggaggatcaattgagcctaggaagtcgaggctgcagtgagctaggatcgcaccactgcactccagcctgggcaacagagcaagggcctgtctctttttaagagacttccataccctgagccctggagctgggtcaggtggcttttctgggcttccacaatgccctctgcttcacctatgacggggttcattaccctgtgtctgccacagaagagctgggatgggtcccacacatcgcatatcacctggtgacatgggcatcagtggagggaggaggtggatggagagtgggtaagggttgggtggggagttaccagggagtcaggaaggatgtccctgtgaaatgaaggcatgggccatgtcccgggaagggcattccaggcagagggcacagcatgtgcaaaggccctgaggcctgaccatgcctggtgtgttggaggaacagtgacaaggtgggtgtggctgaagctcagtgagtggaagagtgggaaggaggtcagcgggagtcctaggtacctaggcacacagggctcatgggcaccaggcgggtgtctgacatgggtacaaacagaatcctctagaggaagtggctgggaattggggaagtctcagctgagacactcatactattccctgtgaggtgtgatttgctgtgcctaattaatcccatgaatcctttccacaacactagagaatatgggccactgagtccattttaaagataaggaaactgaggccaggcgtggtggcacatgcctgtaatagcagcactttgggatagtgagaccccacctctacaaaaaatacaagaattcgccagatgtggtggtgcacgcctgtagtccaagctacttgggaggccgaggtgggaggatcgcttgagcctgggaggtcaaggctgcagcgagccatgactgcacccctgtagtccagcctgggtgacagagagagactattttatttattttattttattttattttattttattttattttattttattttattttatttttagacggagtctcactctgtcgcccaggctgtagtgcagtggtgtgatcttggctcactgcaacctccacctcctaggttcaagcgatcctcccatctcagcctcccaagtagctgggattacaggcacccgctatagggaccagccccacagggtcggtgggtctctccctgtgtgcagagacaagagagtgtagaaataaagacacaagacaaagagataaaagaaaagacagctgggcccgggggaccactactaccaagttgcggagaccggtagtggccccgaatgtctggctgcgctgttatttattggatacaaagcaaaaggggcagggtaaagagtgtgagtcatctccaatgataggtaaggtcacgtgggtcatgtgtccactggacagggggcccctccctgcctggcagctgaggcagagagagagaggagacaaagagaaagacagcttaagccattatttctgcatatcagagacttttagtactttcactaactgactactgctatctagaaggcagagccaggtgtacaggatggaacacgaaggcggactaggagcgagaccactgaagcacagcatcacagggagacggttaggtctctggataactgtgggcaagcctgactgatatcaggccctccacaagaggtggaggagcagagtcttctctaaactcccccggagaaaaggagactccctttcccggtctgctaagtagccggtgtttttccttgacacttttcgctaccgctagaccacggtctgcctggcaacaggcatcttcccagacgctggcgtcaccgctagaccaaggagcccttctgctggccctgtccgggcataacagaaggctcgcactcttgtcttctggtcatacctcactatgccccctcagctcctatctctgtatggcctggtttttcctaggttatgattgtagagtgaggattattataatattggaataaagagtaactgctaccaactaatcattaatgatattcatatataatcatatctaatatctatatctggtataactattcttgttttatattttgttatactggaacagctcatgtcctcggtctcttgcctcagcacctgggtggcttgccgcccacaacccgccaccacgcccagctaatttttgtacttttagtagagacggtggtttcaccatgttggtcaggctggtcttgaactcctgacctcatgatccgcccacctcagccaaccaaagtgctgggattacaggcatgagccaccgcacccggcctgtttattttaaaataaaaatatttaaaaataaagataaggaaactaaggcccaagccccgccccccaaccccacagctaatcaggcccagggctagggcagaagcctgtgttgtaggcctctagaggggccctcctctccatccgagcccctaacccgccatggttccaggagctgcctgagttcgagggggatgtccttgccgtgggcagccaggctctgaccactgagggcatctatgaggacgtcatccgggggtgcttgctgcagaggattgaccaaggtgagtcccgccctgccatggctcagaggagcctggcgtcccttggctgtatgtaccgagccccaccagggccacatcgactctcacttcctgtgaatacttgccatttgaccttaagtcaggacttggcctgaggaggtccagggtagaggagctcagaggggcagggatggatactctctgaaggaagggccgttggactggggctgtgagggatgtataggagttctcaggatgagaagaaggaggcagagttcaaaaactactgatagaggctgggtgtggtggctcacacctgtaatcccagcactttggaaggctgaggtgggcagatcacttgaggtcaggagtttgagaccagcctgtccaacatggtgaaaccccgtctctactaaaaatacaaaaaattagccgggcatgatggcacatgcctgtagtcccagctactcgggaggctgaggcagcagaatcgcttgaacccaggaggcggaggttgcagtgagacaagatcgcgccactgcactgcagcctggcgacagaacgagactatgtcttttttttttttttttttttttgagacagagtctcgctctgtcacccaggctggagtgcagtggaacgatcttggctcactgcaacctctgcctcctgggttcaagtgattctcctgcctcagcctcccgagtagctgggactacaggcatgtgccaccacgcccggctaatttttgtatttttagtagagatggggtttcaccatgttggtcaggctggtctcaaactcctgacatcgtgatcctccccccttgggctcccaaagtgctgggattacaggcgtgagccaccgcacccggccaagactccatcttttattttttattttatttttgagacagagtctcactctgtcacccaggcaggagtgcaatggcatggtctcggctcactgcaacctccgcctcctgggttcaagccattctcctgtctcagcctccaagtagctgggactacaggtgcatgccagcacacctggctaatttttgaatttttagtagagatggggtttcactatgttggccaggctggtctcgaactcatgacctcgtgatccgcctgacttggcctcccaaagtgctgggattaccggcgtgagagacatcgtcttaaaacaaacaaaactacggatagacatttaaatttattcatttaacaaccactccctgtttttctctgggctggcattgaggccctagaggttttcagacttggagttggcctcttaggagctcccgagctgggaaggagctccagaaacatctttctccctcctgcttcctgagttcattcatggattaattaatgcccatgatcactgagatgtgtgcactgattggggggtgaacaggatgcagtggggattcagggaatgtgagcatccatgcagccagcacaagggcacggagcgggaggctggaggctgctggaagatgcgcaaggccttgaatgacaggcagaggaatttagacttatggtgcaggcagtggggagccatggagggtgtgtgagcagaggtcaacagaagccagactggaagtgagggaggaggctgaggccccggttctgggaacaaaggacaggcccgagcaggggcagcagccaagggaacagagtctaggagggaggtgcgggtgggagctggaggtgccagaagtgttgggcttcaggtgtcactaagtgaaggagaggggttccacaagccagggaaggtgtgtggagaacagaggggaatctcaaagagccctcatttgaaggaaagaggaagaacagacatagaaggtgagttcagcagccaggcactgtggctcacgcctgtaaacccagcactttgggaggttgaggagggtggatcactggaggtcaggagtttgagaccagcttggccaacatggtgaaaccccgtctctactaaaaatacaaaaattagctgggcatggtggcacatgcctgtagtcccagctacttgggaggctgaggcaggagaatggcgtgaacccaggaggcggagcttgcagtgagccgagattgcaccactgcactccagcctgggcgacagagcgagactccatctcaaaaaaaagttgtttttttttttttaaataaggtgaggtcagagagttgggagacacccccatagatggtgggttcttgggagccagggaatgagggagaggatgtgtctgtgagcatctaaacaagaaaaatggagcttccttaaaatagcagaagttttaaataggaataaaagctattttctgactgcagaattaaatccagaaacagttgacctcaataagtttctcttcctaaagattttatgtatccttaagtgggtccatcctgaattgatttgtgatgtctgcctagagcagcatgttgggaggtgggactggcagtgtccaggctcagtgaagggtgcagggatcggttagcaatgtctgccatgggtgcgggcttggagagaggctctatgtgagccacctctttaggatttctgcttgagacatttgtagtctctctgggaaaatgcagggaagccccttgatgcctgggcttccccaggtgtgtccaagagttcatctcatttcagaattgaaaaagacccttggtgccaatgatgtatcctgcactctggacggctgcttggaggtcccatgggaacaggagggagcaggtggggaacttcacaggcttctgaaacatgccagtgattgctgggggtggggaggtggaggcccacatggggtgtatgggattgtcatgagtgtgggttcatggacggaacagaatgcactttgtctccttacccagccagcctggccaagctcgtgaacaagctcagtgggaagttgtggagtgcatctgagccacagagggaccctctaaacccaggctctgacatgcatgtgagctcagccctggggggctgagattgtggtgaatttgtgtcccatctctctctctctctctctcttttttttttttttgagacagagtctagatctgttgcccaggctggaatgcataatctcagctcactgcaacctcctcctcccaggttcaagtgaatctcctgcctcagcctcccgagtagctgggactacaggcggcacatgccaccatgcccagctaatttttgtatttttaatagagatggggtttcaccatgttggccaggctggtctcgaactcctgacctcacatgatctgactgcctcagcctcccaaagtgctgggattacagatgtgagccaccaggcccagcctttgtatcccatctctaatcctaggacttagggggcatctcccaatggctacttcctgtcgccaacttggaaagggagattgtagtgacaggggccttaggtttaccaccagcaagagcttccaagatggccataatttgggggataatttttttatgcagcaatagctaactaatacacttcctagctgatctgggacagagaaactgatcaatatttacactaacttggataaatagttaaacagtcctagaaagacttctaaggccaggcacagtggctcatgcctggaatcccagcactctgggaggccaagataggtggattgcttgagcctgggagtttgagaccagcctggacaacatagcaagaccctgtctctacaaaaattttaaaaattagttgggtgtggtggaatgcacctgtagtcccagctacccgggaggcccaggtgggaggtttacttgagccgtggagatggggtggcattgaactatgattgcaccactgccctctagcccgggccacagagagagaccctgtctcaaaaacacaaactaacaaatacaaacatgagtgttagaatatttcaggatttgcaattggatgtgagggattgtagatgggcccctgaatttatttaaccagaaccaaaccaacaggcatttggtttctagtcttccatactaacagccaatgccacagggattaatcttgtacatactttttttttttttttttttttttcaaatgcaggttcctgtgggcaaatcccgcaatgggaaccctcagaatttaaagtatgtgtgtttgtcatttcaacagagggctgtccaccagggtagcctcactggtgcccctcacctttgtccgggaggtttaggagctgcttttagctccttttctgagaaccttctctcctatccttcaccctttcatcttttggctgcttatacatttctttttctttttatttatttatttatttattttttgagatggagtgtcgctctgtcaccaggctggagtgcagtggcagcatcttggctcactgtaacctccaccttgcgggttcaagcaattctcctgcctcagcctccccagtagctgggattacaggcgtccaccaccacgcccggctacttttgtatttttagtagacatggggtttcaccatgtcggccaggctgattttgaactcctgacctcaggtgatccacctgcctcggcctcccaaagtgctgggattacaagcgtgagccactgcacccggcctacatttctttttttttatttttattttttgagatggagtttcgctcttgtcacccgggctggagtgcaatggcgcgatctcggctaactgcaacctctgcctctcgggttcaagcgattctcatgcctcagcctcccgagtagctgggattacaggcgcccaccaccatgcccagctaatttttgtatttttagtaaagatgaggtttcaccatgttggccaagctggtcttgaactcctgatccttggtctcccagagtgctgggattacaggcatgagccattgcgcccagccaacatctctattaactctgattttttaagcacttattacatgccaggcatctgacacatctgatttttgacgtccgtatattttccattatacagatgaggaaactgaggctgagcgggaaggaggggcttgtcccaggcagccagactctggtgcccagatccagccactctgcccaccgccttctccaggaacattccggagctgaatcttcacccacatctatcttgtttctattggataaatgtctacaagtggaatttctgggccaaaacggatgtgccatctttaggcttttgtaacccctgcaacttcagaaaactgtaccattttatactccaagcagcagcatttatttgtgtattttccccaaggctttctttattttaattttttttttttttttgagactgagtcttgctctgtcacccgggctggagtgcagtggcaggatctcggctcactgcaacctccgcctcccgggttcaagcgattctcctgcctcagcctcccgagtagctgagatttcaggcacccgccaccatgcctggttaatttttgtgtttttagtagagatggggtttcaccatgttggccaggctggtctcgaactcctgtccttaagtgatctgcccccctcagcctcccaaagtgctgggattacaggtgtgagccaccacacgtggcctaattttttttttttaaataatagagacaaggtctcgctatgctgcccaggctgatctcaaactcctggactcaagcaatcctcctgccttggcctcccaaagtgctaggattataggagtgatccactatgtccagcctccaaatcctttctaaacactaggacttttcatgaaaagaaaaaagctatgccagttagacacacacagaaatctcatgattttattttgaatttctttgactaaattgaacttacaaataagtttattatggccaggcgtggcagtgcacacctgtaatcccagcactttgggaggctgaggcgggcagatcacttgagctcaggagttcaagaccagcctggcgaacatagtgagacctcatctctacaaaaaatacaaaattagcggccgggagtggtggctcacgcctgtcatcccagcactttgggaggctgagacaggtggattgcttgagccaaggagttttgaggccagcttgggcaatgtggtgaaacctgtctctactaaaaaataaaataaataaataaataaataaataaataaataaataaataaaatttaaaagaagctgggctgagatgggagatttacctgagcctgggaactcaaggctgcagtgagtggtgattgcaccactgcactccagcctgggtgatgggagtgagaccctgtctcaaaaaacaaaatccaaatatgttgattagccatttacatgtttgtagtttttttttttttaatttcagtgaattgcctgttcatagcttttttctacttttcaggagtgtttgcatttttcttattgatatctaataactctttatatctgaaggatatgaacgctttgtgatacaggttacagattttggggtttttttctccgcttgctgtgagccttttgggtttgtttcctagctccaaatcttaacttggtgtcaagtttcctggctgggagacaagcttttaccgacttcctctgcttgccagcaaagtcatctgctaactggatattggcagcttctctgctgtcttgcagctgcttccggagtgggttccacagggattcccgtgtgttcttggttcagcttgcagagggactttcacactccctggagaccgtttcctcccattctgtctggagttttcggcctaccccaagacaatgagatattcctgacctttccacctatttccctccaaccccaccttccgaaatacatttgctcaatacatttgcacttcataggcttctttagctgtcttccttttaccccggacgggatgtagatgttaattctggaacaattgcagctacaagaatttgtcatcctgccccttttgagaaaaacattgtttgcccttgggtctaaatccttccagatgggatgggatgtatcttgtcacctcctttttcttacttaatatgaaaagacctttcctcatcaagtccacagagtgtaaatttgtttttacctttttttttttttttttgagacggtgtctcactctgtcacccaggctggaatgcagtggtgcgattttggctcactgcaacctccacctcctgggttcaagtgattctcctgcctcggcctccgtagtagctgggattacaggcgaagcgccaccatgaccggctaattttttgtgtttttagaagagatgggggcttcaccatattgaccaagctggtctcgaactcctgacctcaagtgatccgcctgcctcagcctcccaaaatgctgggattacaggcgtgagccactgcacctggcctgtatcattcttaaaaattaagttttagcggggcatgatggctcactggtaatcccagcagtttgggaggctgaagggggaggattacttgagaccaggagtttgagaacagccggggcaacatagcgagactccatctctacaaaaaatttaaaaattagctgggcgtggttgagtgcacttgtagtcccagctacttgggaggctgaggcaggaggatcagttgagcccaggaggttgaggctgcagtgagccatgatcatgtgatcatgccactgcactctagcctgagccacagagtaagaccctctctgtgaaaataataataagctgggcgcggtggctcacgcctgtaatcccagcactttgggaggctgaggtgggcggatcaggaggtcaggagttcgagaccagcctggccaatatggtgaaaccccatctctactataaacaaaaattagccgggcgtggtggcgcgtgcctgtagtcccagctactcaggaggctgaagcaggagaatcgcttgaacccgggaggcggaggttgcagtgagccgagatcgcgccactgtactctagccggggcaatggagtgagacgctgtctcaaaaaaaaaaaaaaagaaaataataataataataataataatgttcagatgtattttttaaagtttttattgtttttaaaaatagaggcacggtcttgctatgttgcaccactgcactccagcccgggcaacaaagccagactccgtctcaaaaaaaaaaaaaaaaaagtgtgatactaagtcaatcaatttgaaaatgcggctctagagtattggaaaacaatcccttgacagcgtttccatgaaaacatggcccttgtctctggaagagcttgtgcccagaacggtccattatcatgccctggctctattttcacgccaaccctatagggtctctatgatctcattttatagatggacagactgaggctcacatatagcaagcccaaggcggggactgaatgtgacgccaggtctgtggacgtcatgacctttattctccacaaccctcaatgacatccctgtgagatccaaaaccaggatggcaaaacccacgttgcagcagaggaaactgaggctaaggtctcttgggtcccaaaccaggtcctaagtagccaagtccgcctggtggcacagcccgggttttatacatggggaaattgggcggcgcatctggcggaggtctcagtggtaggaggcgcctggaggaagcgcgggttcctaaccctaacgctacccctaacatcccttccacgcgctccgagcgctatgtgcctttaagatcggtgcgggggcggggcgtcctgggtagggctgcaggtgacgtcactccgggccttgggactcggagagcgtctggaggcggggcctggacttcacgcccggcgcgctcctcccctttaaggcgcgcggccgggcggggcccctatgacccctttaaggcgcggccagagtcctcccgcagaaaaacgacttaaaggagacgcgtggcgcgatggcggcggccccacgcgcgggccggcggcgcgggcagccgctcctggcgctgctgcttctgctgctggcgccactgccgccgggggccccgccgggcgccgacgcctacttccccgaggagcgctggagcccggagtcgcccctgcaggcgccgcgcgtgctcatcgcgctgttggcgcgaaacgcggcccacgcgttgcccaccacgctgggcgcactcgagcggctgcggcacccgcgggagcgcacggcgctatggtgagtcgagcccgctgtccccatcaggcgggtcacgcgagcccctgcttgctgtccccataggggtgggtccacgcgagcccctgcccgctgtcctcttctgggcgggtccgcgcgtgcttcctgctcgctacccccatcgggacggttctacgcatgcccctgcccgctgcccccatcgggacgggtccacgcgtgccccctgcctgctgtcctcccatggggccagacacagccctccccacaacacaagcgggaccgagttcctcctgctggctcctttggggtgggctgggcaccgcttctgcctgctggaccctactagggcagctccggcctcactaactggggctctaactccctctggggcacgtacacctccaaaggacggagcccagagcccccactggggcgttgccagaggccacatctaacagcaagcctttctgtgccggctgctgcccttaagcttgaactcagcctggctccaggccccagtcaaacccctgccctcagaccggcgtgggtggagtccaggaccagatggcccaggaggaagtggatgctttcttggtagggaatggggcagagctctgaagaaacctttgactggtgacttctcactccctgcctcagttttctcaaatggaaaatgggtccgggtgcagtggctcacgcagtaatcctagcaatttgggaggccaaggtaagcgggtcacttgagctcaggagttcgacaccagccttgccaacatggcaaaaccccgtctctagaaaaaaaatacaaaaattagccaggtgcggtggtgtgtgcctgtagtcccagctattcaggaggctgacgcaggagaatcgcttgagcccaggagttcgaggctgcagtgacctatgattgcaccactgcactccagcctgggctacagagtaagacctgcctctaaaaaaagaaaaagaaaagaaaatgagcgtattaatataattctctttttgggtttgtctctgaagattatccagttaatggatgtggagcccttgggtctggcatgggcttggctctcagtgattttattatcatgattactgtcattgctggtgttattgtcaacttaatttattgggcagaattagcttttggcactacggtcaaactaaactcccaaatgtcgcttttccttccacctgatttctcagtctggataatccaaatacacaattggtacttaacaaatgtttgttgaatgaataattgactgcagcccactgaagtggtgtggctcacaggagaagatgaaggcagggtaagggatttatgagatatactttgagatatacttttttttttctctcagacggaatcttgctctgtcgcccaggctggagtacagtgacacgatctcagctcattgcaacctccgcctccgggttcaagtgattctcctgcctcagcctcccgagtagcttgggattacaggtgcgcaccaccatgcctggctaatttttgtatttttaatagagtcagggtttcaccattgtggccaggcttgtgttgatctcctgacctcatgatctgcctgcctcggcctccctaagtgctgggattacaggcatgagccacagcgccctgctgagatatacttttttttttgatacagggttttacatctgtcgcccaggcgggagtgcagtggtgcaatcctagctcactgcaacttccccctcctgggctcaagtgattctcctgcctcagcttcttgagtaactgggactacaggcgtatgccactgcgcccagctaatttttgtattttttctagagatggggttttgccctattggccaggctggtctcgaactcccgagctcaagtgacctgcccacctcggcctcccaacatattgggattacaggcgtgagccattgcacccagctggtttctgatatatacatttcattttttaatattttttatttatttattttttgagactgagtctcgctctcgttgctgaggctggagtgcagtggcacgatctcggctcactgcaacctcctcctcccaggttcaagcgattctcctgcctcggcctcctgagtagctgggattacaggtgcccgccaccacacccagctaattttttgtgtttttagtagagatgggatttcaccatgttggccaggctaggctcaaactcctggcctcaagtgattcacccgcctcggcctcccaaagtgctggaattacaagcgtgagccaccatgcccggcctaatttttgtatttttagtagagatggggtttcgccatgttggccaggctggtctcaaactcctgacctcaggtgatacacccgcctcggcctctcaaagtgctgggatgacaggcgtgagccaccgtgcctggcctgatctatacattacaaaaattgccgtgtgcggtggctcattcctgtcatcccagcactttgggaggctgaggcaggtggatcacctgaggtcaggagttcgagagcagcctggccaacatggcgaaaccccatctctactaaaaatgcaaaaattagctgggcatggtggtgggcacctgtaatcccagctactcgggaggctgaggcaggagaattgcttggacctggtaggcggagattgcagtgaaccaagattgtgccactgcactctagcctgggtgacagagcaagactctgtctcaaaagaaaaaaaaaattaagtgacacatatttgttagtgaatgtggtttgcaagatcttagatgctcagtaataaaacagccaatcactaatgggtctttccaaaatcagcttgtttaatccttccacttcccagtaaactgggtcctgttcccacccccatgttacagatgaggaaactgacatggaaagggagaaatgggccgggcgcggtggctcacgcttgttaagtccagcactttgggaggccaaggtgggcggatcacgaggtcaggagatcgagaccagcctggccaacatggtgaaaccccgtctctactaaaaatacaaaaaaattagccgggtgtggtggcgggcgcctgtagtcccagctacttgggaggctgagacaggagaaggcgtgaacccgggaggcggagcttgcagtgagccgagatcgcgccactgcactccagcctgggcaacagagcgagactctgtctcaaaaaaaaacaaaggaaagggagaagtgtcctgtccagggatacatagctggtgggaggccagttggggatggtggtccttgacttgcctcactgctgcctggtcctgcctcagtctccccaagtacgctgcctgtcccctctccctgcagggtggctacggaccacaacatggataacacgtcaactgtgctgcgggagtggctggtggccgtgaagagtttgtaccattccgtggagtggcggccagcagaggagcccaggtgagcatctttcccctgctcctagtctgattgggctttgcctctgctcacacaccctctatggctccccattgccccagaacaattacaggccctcagtccctgcctccagcccagccaggcagcattaagctactctgagcctccctcagctttacaaataggccataatcctcttctcagacctttgcccaagccgttccctgtacctagaattctttcactccctttttcttctggggacgcccactgctttgttccctggctcactgactcagtcttggtcccagcactggctttgctgtttatctactccctaaagccctgggcagcatggactccctgcccccacccagttcctttctgggtttttgttttttttttgagacagggtctcactccctcacccaggctggagtgcagtggagtgaacacagcttactgcagcctttaactcctgggctcaagccatcctcccgcctcagcctcctgagtagctgggactacaggcacatgtaaccatgcctagctaatgtttttgtattttttgtagagatagggtctcactgtgttgcccaggctggtctcaaagtgctggcctcaagcgatcctcccacctctgcctcccaaagtgctgggatcgcaggcgtgggccactgcactggaccccactgagcttccttccttccttccctccagtgtgcctcgggctttcttccctccaggcctttgcacaggctgtacctccggccaggaacattctccccacttctctttcctcgtcgtttactttttcccatccctcagatcagcttacacgtcccctcctccaggaagctctctctgagtaccccgaaggcagctcaggccctcgctgggctttgatagtgccttgtgatgtccacatcacagctgcctccccataggtcctacccggacgaggaaggcccgaaacactggtctgactcacgctacgagcatgtcatgaagttgcgccaggcagccctgaaatcagctcgagacatgtgggctgattacatcctggtaagtttctcagccggccggatatggatcacaggcaggtctgggtatccccagggaaggcggagcagcaggatgccaggaccatccttaatgttgttttgcagaagggtaaactgaggcttagagaggggagatgagttgcttgaggtgatatggttggtcagtggaggaggagctgggattcatttgatcctcagcactaggaatgaatgggcttttctgtccccagttgtcccctgtgtttggacacttgggtcaagtccatttttatttttttatttttttgagacagagactcactctggtgcccaggctggagtgaagtgccgcaatatcggctcactgcaacctctgcctcctgggttcaagcgattcccgtgccacagcctcctgagtagctgggaccacaggcacccaccaccacgcccggctaattttttatttttatttttgtggaagccaggcatggtggctcatgcctataatcccagcactttaggaggccaaggcgggtggatcacttgaggtcaggaggtcgagaccagcctggtcaatatggtgagactccatctctactaaaaatacaaaaattagccgggcgtggtggcaggtgcctgtaatcccggctacctgggaggctgaggcaggaggatttcttgaacctaggaggcagaggttgcagtgagccgagatcgtgccactgcactccagtcactgggcgacacagtgagactccatctcataaataaatacataaataaatatttttaaaaaataacaaataaaaaatatttttgtagagacggggtcttgctatgttgcccaggctggtctccaacccctgggctcaagtgatcttcctgcctcggcctcccaaagtgctgggattacaggcatgggccaccgtgcctggccgtgtcacgtctgtttttatcaccatcatatgtaatggccaaacctttgggtcacttccaagaagcaggaggaaggggtcaggggctggggggtggtggccacattgaattgctgaggcctgacttgcacttcctcctcctgtggggacattgtctcatggggaagggaacagttgagtctttttatttttttctcgagccaagatcacgccactgcactccaacctgggccacagtatgagactctgtctcaaaaaaaaaaaaaaaaaaaaaaaaacagacttataggttgaatattactattattttttaatttgtataaacttatggagcacaagtgtaattctgttacatgcatagattgtgaagtggtgaagtcagagattttggggcgtccatcccctaaataatatacattgaacccattacacagttttctatgatcaaccccaaatgttatttcagccttcatacttttctatattctcctgattttcttttttcttgttttttgagacagagtctctgttgcccaggttggagtgcagtggcacaatctcggctcactgcagcctcctcctcctgggttcaagcaattcttctgcctcagcctcctgggtagctgggattacaggcccccgccatcatgcctggctaatttttgtaattttagtagagacggggtttcgccatgttggccaggctggtctctaaagtcctgacctcaggtgatccagctgcctcggcctcccaaagtgctgggattataggtgtgagccaccacatccagcccatctcttaaaacaaacaaacaaaaagcagaaaagaaaaagcaaagagtcaagtgagcaaagtgattacgatgcagtggtggctagaggtccaactacacaggccagtggaggcacttggtgtctacttggaggggaatggggagccatggagggtgtgtgagcaggggaggtctgtgttctgatttgagattttcagaagcctctgtggaccaggcgcggtggctcatgcctctaaattcagtactttgagtggctgaggcaagtggattgtttgacttcaggagtttgagaccagcctggtcaacatggtgaaaccctgtttctaccaaaatataaacattagcttggcatggtgatgcgcgcctgtaaccccagctacttgggaggctgaggcaggagaatgtcttgaacccgggaggcagaggttgcagtgagctgagattgcaccactgcgctccagcctgggcgacagagtgagactatgtctcaaaaaaaaaaagccacacactagcaggaagctggagtagaggcccaagcagggtatcagcgattgatggacaggcctgcatggggtgggggccgtggagaaaggcagggggttcaggatgcgtcacgaggtgaaggagacaggttctgctttgacactggatgtgaaggtgccagggagagaggaacggggacagtgccacatctagggaggacggatggagctcctgaggggaccctttcgcttggtgccttatcagaccattttataggtgaggaaacaggctgacggaggggacatcttgcctggtggggtgtcagaactggcaaggaggcagagaggtggatctggagccttccagagccttctgacacaaagctgccttgtcctgcctctaggattttgcttttgtggtttgaggttgcctggctttagcttttttttccctcagcaaaccggggtggaactcaaagtgctggttcaaaactcaaagtggcttttgacacaaaataatattttcgtgtttctttttttttttttttttttttgagacagtgtctcactctgtcgcccaggctggagtgcagtggcgcgatcttggctcactgcagcctccacctcctggggtcaagtgactctcctgcttcggcctcccaagtagctgggactacagatgcttgccaccatgcccggctatttttttttttgtgacggagtctcactctgtcgcccaggctggagtgcagtggtgcgatctcagctcactgcaagctctgcctcccaggttcatgccattttcctgcctcagcctcctgaatagctgggactacaggcgcccgccacaacacccggctaattttttgtatttttagtagagacagggtttcaccgtgttggccagcatggtctcgatctcctgacctcgtgatccacccggcttggcctcccaaagtgctgggattacaggcgtgagccagcgcgcctggcccgactaattttttttgtatttttgtagagacagggtttcactatgctgaccaggctgatctcgaactcctgacttcaggtgatccacccacctcgtcctcccaaagtactactgggattaccggtgtgagccactgcgcctggtcacaaaattatatttttgtaactggggactttggaacccatattggaatgtgaaatagtttgtctaatgttttaaaatgattgtttgaaggtccccctttctctctctttttacaaaagctatggatgttacttgcaggtaaaaaaaataaataaaaatatacgagctgggtgtgtctcacgcctgtaatcccagtgcttcaggaggccaatgtgggaggatcatttgaggtcaggagttcaaaaccagcctgggcaacatagtgagaccccccccatctctacaaaaactaacaaaaaaaaaaaattagccaggtgtactggtttgtgtctgtagtcccagctaattgggaggctgaggtgggaggattgcttgagcccaggagtaggaggctgcaatcagccatgattgtgtcactgtactccagcttgggtgacagagcgagaccctttcttaagcttcgtatatgtgtatgtgtgtgtgtatgtgtgtgcgtgtgtgtatacatatatacatatatacgtgtatatgtatatatatctatatatgtatataaacatatatacgtgtgtgtgtgtataatatagatatacatatgaaacaagaaagaaaaacatctactttttttttttttttttttttgagatggagtctcattttgtcacccaggctagagtgcagtggcgccatctcggctcactgcaacctctgccttctgggttcaagcaattttcctgcctcagcctccggagtacctgggattacaggtgcccgccaccatgcctggctaagtttttgtatttttagtggagatggggtttcgccatgttggccaggctggtcttgaactcctgacctcaagtgatcacctgcctcagcctcccaaagtgctaggattgcaggcgtgagccaccgcccctggccagcatctaaattttaattgtatctcctggagagattcactttctcctctttcttgtttgttttaattgaagtcagttcacatatatatttatttgttttgcaaccaccacctctaattctagaacattttcattccccagaaagaaaaccctattcccatcagcagtcactccccaactccccattcctctcccctaggctctggcagccactaatctgcttcctgtctacggatttgtcaatggaatgtcacactatatggcgtttcgtgtctggtttctctcactcagcattgagttttcagggttcattacagcctggatcagtgcttccttcctttgtatggctgactcttattccgttgtctgggtggaccacgttatgttgatctcctcatccgttgatggacacacttcagtcacttccaccttttttggctgttgagactttttttttgagacagagtgttgctctgtcgcgcaggtttgcagtgcagtggcacgatctcggctcactgcaacctccatctcctgggttcaagcgattctcctgcgttagtctcccgagtagctgaaattacaggcatgtgtcaccatgcccggctaattatttttatttatttttatttttagtagagacggggtttcaccgtgttgcccaggctggtcttggactcttgacctcatgtgatctgcctgccttggcatcccaaagtgctaggattacaggtgtgagccactgcacccggcctggctgttgggattctgacatgaacatgagcgtacaaagacctgtttgaattatctgggcatggtggtgcgcgcctgtatttaatcccagctactcaggaggctgaggcaggagaatcatctgaacctaggaggtggaggttgcagtgagccgagatcacaccactgcacttcagcctgggtgactgagcaagactctgtctcaaaaacaaacaaacaaacaaagaagctgtttgagtcctttctttcaattctcttggttcatacctaggaatggaattcctggatcatgtagtaattctatgtttagctttttgaggaactgccacagtgatctggctgtttgttctgcattaatattcaaaggtcacagattcaaacatccagagggaccggatggggtgtgtaacatgaccacagggcttgtcctaagacccagccacctcccctctgcaactgaaggttgccatgtggaaatggtattctcacgttgccaggggatactggaattctagtttttgttgttgttcatggcagttaatccaaatattctaaacgatactgcctgggtaacagaaagcatctctgtggaccagcagtaaaagaaaaaaaatccagaccgggcacaatggctcacacctgtaatcccagcactttgggaggccgaggcaggcgtatcacttgaaatcaagagttcgagaccagcctggccaacctggtgaaaccccatctctaccaaaaaatacaaaaattagcctgacgtggtggcatgtgtctgtaatcccagctacttgggagactcagggagaattgcttgaacatgggaggtggaggttgcagtgagccgagatcacgccgctgcactccagcctatgcaacaggagacgccatctcaaaaaaacaaaaacaaaaacaaaaaaccttctggtagttctgtgatatatcatgacttctgtgtctttacatcctggtagagggggaacgtccggacctaatcattttctatgtgtgattttatatatatatatttaattttagtctaggtgcagtggctcagacctgtaatctcagaactattgtaggccatggggaggatcgctttgagcccaggagttcaaaaccaccctaggcaatgtagagggatcctatctctacaaacataaaaataaaaatgaaaacattatctaggcatggtgacgtgtgcctgtacgctcagctacttgagaggctgagatgagaggatcacttgagcccagaaactccaggctgcagtgggctacgattacaccattgcacttcagcctgagtgacacagcaagatgctatccctttaaaaaataaaaaatgaagaaaaagtaaaatagtaggccaggcatggtggctcatgcctgtaatcccagcactttgagaggccgaggtggacgaatcacatgaggtcaggagtttaaaaccagcctggccaacatgatggtaccctgtctctattaaaaatacaaaaagttacccgggtgtgatggtgcacggctgtagtcgcagctactcgggaggctgagacaggagaatcgcttgaacccaggaggcggaggttgcagcgagctgagaccataccactgcactccagcctgggtgacagagcgagactccgtctcaaaaaaaaaaaggttttgctaccttcttgctcattggttgttcatttatttctcagggctatctcagtgcctagaattttctttgaaggaactgaagacctttgctttatttccatgatccaggggatcctgcaggcccccaaaacggggtccctgcttcatttcatccggtgtagggggtgcttccagaggtctttgccagacccccagggcactggcctttgccccagctgttctgaatggtagcctgacctggcagcccatgctgatgctttgtggggtgttctgcagtttgtagatgcggacaacctgatcctcaaccctgacacactgagcctgctcatcgctgagaacaagacggtggtcgcccccatgctggattcccgggctgcgtactccaacttctggtgtggaatgacttcccaggtagagtgagggcctggggactgtggggactgggctgagcaggggggtgccgtggctagagtgtaacttactgtcacacaacctcgtggtgtgtgttttacaaaaatcatcatggaagctgggcacggtggctcacacctgtaaccccagcactttgggagactgcggcaggcgggttgcctgagctcaggagtttgagaccatcctgggcaacatggtgaaaccccatctctactaaaaaaaaaaaaaattacagaaattagccgggtatggtggcacatgcctgtcctcccagctgctcgggaggctgaagcatgagaatcacttgaacccaggaggcggaagttgcagtgagccgagatcacgccactgcactccagcctgggtgacggagtgagacttggtctcaaaaacaaaacaaaacaaaaactcattatggtaatctttaaacagccctctgaggccagacaggagggaagaatagagggtccttgattgtcccccaccatgctattccagaggtggaaacagaaacacagagaggaagtgacttgcctaaagtcacacagctagcaagtggtggtgtcaggatgggacttcaggcatggcttgatccaggtgtttggataactgtctttctccatcctttgggtgggttcattctcagacagcttgagagtgatcccagcagcgtctagccatcatccattctgattgggccattgctagtctcctctccacactacctctgaactcattactgaagctgggaaaatacaaggctctttcttattggccatgcctggccacaggtcccacactgggcttgagtctggggtcctgggaccacaggcgcacactgctgtgcctggctgtctgtctggtcctgtttcatgccgcccactatcacgggtctccatcctcacctttcaagacccctacgcggaactctcgctctctccccacagggctactacaagcgcacacctgcctacatccctatccgcaagcgagaccgccggggctgctttgcagttcccatggtgcactcgaccttcctgatcgacctgcggaaggcggcgtccaggaacctggccttctacccacctcaccctgactacacctggtcctttgacgacatcatcgtctttgccttctcctgcaagcaggcaggtacgtacatgaggggtctgccatcgcaggggcatctgcctggttctttgggttttgcactaagccagttcagaacacactgaagattcacagaacccaaacaatgcagcgcagggctgacttcaggtgcagctgtatctaggtgttcagataatgtctccaggaccccgtttctctccagccctggctttgctggttagcttcattccctagctctttaagatctattggttggtcaggcagagtggcttatgcctgtaatcccaacaatttggcaggctaaggcgggtggatcatttgaggtcaggagtttgagaccagcctggccaacatggtgaaaccccatctctactaaaaatacaaaaattagccggacgtggtggtgctactggggaggctgaggcgggaggatcacttgaatatgggaggcggaagttgcagtgagccgagatcatgccactgcactccagcctgggcaacaaagtaagaatccttctcaagaaaaaaatacctattgattgcatgttactattattttttaatttgtgtaaatttatggagcacaagtgtaattttgtcacgtgcatagattgtgaagtggtgagtcaagagattttagggcatccatccccaaataatatacattgaacccgttacacaattttccatgatcaaccccaaatgttatttcaatcttcatacttttctatattctcccaattttcttttgttttttttttttgaagtagagtcttgctctgtcacctaggctagagtgcagtggtgcgatctcggctcactgcaacctctgcctcctggttcaagagattctcctgcctcagcctcccaagtagctgggattacaggcatacgccaccatgtctggctcatttttatatttatagtagagacagggtttccccaggttggccaggctggtctcaaactcctgaccccaggtgatccgcccacctcggcctcccaaagtgccgggattacaggagggagccactgcacctgggccattctcctaattttctacagttgagcatatattaattgtttaattgggaaaacaaatatttaaagagacagcacagcctcatgttgacttgttgtttactggaaaccagaggttggcaaactgacctgcaggccaaacctggcccactaattactttttttttttttttttttttgagacggagtctcgctctgtcgcccaggctggagtgcagtggcccgatcttggctcactgtaagctccgcctcctgggttcacgccattctcctgcctcagctttccgcgtagctgggactacaggcaccagccaccaggcccggctaatttttgtatttttagtagagacggggtttcactgtgttagccaggatggtcttgatctcttgaccttgtgatctgcccacctcggcctcccagagtgctgggattacaggcgtgagccaccgcgcctggccccactaattacttttatatggccacaagctaacaacaacttttatattttatttttatttttttagagacacagtcttactctgtcacccagcctggagtgcagtggtgtgatcgtagctcactgcagcctcaacctcctgggctcaagcaatcctctcatctcagcctccagactggctggggctataggcacctgcctacatgcccagctaattgaaaaaaaaaatgtttttgtagagatggggtcttgctatgttgcccagactagacttgaactcctggccttaagtgatccttcccacctcagcctcccaaagcgctaggaatacaaacgtgagctacggtgcctggccaacaatttttacatttttattatttatttatttatttgacacagggtctccctccgttgcccaggctggagtacagtggcatgatctcagctcactgcaacctccacctcccaggttcaattgattctcctgccttagcctccctagtagctgggactacaggtgtgcaccaccacgcctggctaatttttgtatttttagtagagatggggttttgcctgttggccaggctggtctcgaactcctgacctcaggtgattcacccgcctcagcctcacaaaatgctgggattacgggcatgagccaccacacccggccaatttttacatttttaaatcactggggaaaagaatcaaaagaagaagaatattgtgacacatgaaaactgtatgaaattcagatttcattgcccatcaataaagtgtcatcagtacccagccaagcccattcatttaagtgtcgtctgtagctgctttcaagtgccacaggcagaacagagtcattgagatagaaaccgtctggcacacaagcctaaaatacttaccacctggccctttatagaagaaattgaccaattaaaattaaaagaggccgggtgtagtggctcatgcctgtaatcccagcactttgggagggtgaggtgggtggatcacatgaggtcaagagtttgaggccagcctggccaacatggtgaaacccgtctctgctaaaaatacaaaaattggctgggcatggtggtgggtgcctgtagtcccagctacttgggaggctgaggcacaagaattgtttgaacccaggaggcagtgaacggagatcacaccactgcaatccagcctgggcgacagagcgagactctgtctcaaaaaaaataaataaattaaattaaaagagcatcattgagttttttagtctaaaaaagatacacacttggctgggctcagtggatcacttgaggtcaggatttcgagaccagcctggccaacgtggtgaaaccccacctctactaaaaaaaaatacagaaattagctgggtgtggtggcgggtgcctgtaatcccagctacttgggaggctgaggcaggagaattgcttgaaccccagaggcggaggttgcagtgagccgaggtggcaccactgaactccagcctgggcgacagaacgagactctgtctcaaaaaaaaagatacacactcatcaaaatttaaaccatccagaaaaggatagatgtagaaggaagtaacttaactcacattttgtcaaactttcctttttgtgcctcaacatgcatttttactgttttttttttgggtttgtttttgagacagggccttgccctgttgcctaagctggagtgcagtgtgccatcatagctcatggcagcctcaagtctcctgggctcaagtgatcctcctgccacagcctcccgaggagctgggaccataggcaggtaccaccattcccagctaattttaaaattatttgtagagccgggcgtggtggctcatacctgtaatcccagcacttcaggaggccaagacaggtggatcgcgaggtcaggagatcgagaccatcctggctaacatgatgaaaccccgtctctacaaatacaaaaaattagccaggcatggtggcatgtgcctgtagtctcagctactagggaggctgaggcaggagaatcacttgaacccgggaggcggaggttgcagtgagccaaggtagtgccactgcactccagcctgggagagtgagactctgtcttaaaaaaaaaaaaaagttgtttgtagatataaggtcttgctctgttgcccaggctggtctcagacacctgacctcaagcgatcctcctgcgttggcctcctgaagccgtgggatggaaggcatgagccactgggcctcgcctgtttttacatttgtctgttgcttccctgcccactgcagaggttcagatgtatgtgtgcaacaaggaggagtacggattcttgccagtgccattgcgcgcccacagcaccctccaggatgaggccgagagcttcatgcatgtgcagctggaggtcatgggtgagtctgcctgcacaccgccctgggaggtgccaggttgcctccctttcactgatgtctcaaatccgtcccatgagcactgactgagtgccaggcagatgcaagtccctgtggggggtgctgggtgcaacggcacgtgtgaacgaggtggagggttgtgtctgctctcacagagtgctggtttgcaggtagctgtacacagcatgcttggggttgtcgggtgggcttcctggaggaggtggcattaaggggcaggttgagtaggagttcaccataaaggggattgcagcaggaggtggtagtgtgggcaaaggccgggaggctggaagggacgtgaacctggggaacaggcaaggtcagtgatcccctggggctggtatccagggccagggtggatggcctcagagaccaggctgaggaagggaccttccccctgaggacagtcaggagctatagaggacatgaaaactgagaggacagcaagttttcactaaagaactgcatgtataggccaggcatggtgactcaaacctgtaattccagcactttgggaggccaaagtaagaggattgcttgagcctaggagttcaagatcagcctgggcaacatagtgagaccccatctctatattaaaaaaaattttggccgggtgcggtggctcatgcctgtaatcctaacacttcgggaggacgagacgggcggatcacaaggtcaaaagatggagaccatactgaccaacatggtgaaaccctgtctctactaaaaatacaaaaaaaattagctgggtgtggtagcgaatgcctatagtcccagctacttgggaggctgaggcaggagaatcacttgaacctgggaggcggaggttgcagtgagccgagatcgtgccactgcacttcagcctggcaacagagtgaaactccgtctcaaaaaaaaaaatttttttttaattagtccgacatggtggcacatgcctgtattctagctactcaggaggctgaggtgggagaatcctttgagcccaggagttggaggccgcagtgagccataatcgtgccactgcactacagcctgggcaatagagtaagtctgtctcaaaaataataataataaaaaataattatcccagctctttgggaggccaaggtgggcggatccctggaacccagtagtttgagaatatcgtgggcaacatggtgaaaccttgtctttaccaaaaaaaaataacaaaaattagccaggcgtgatggcacacacctgtggtcccagctactcgggaggctgaggcgagaggatcccttgagcccaggaggtcgaagctgcagtgagccaagattgcttcactgcactccagcctgggcagcagagccagaccctgtatcaataaataaataaataaaactttaaaaaaatccatgaactatgaaaccagcagccgtccctctaaaactggaggagcacgcagggctgagctgtaattgaggttgtctagggatgatgctcccatctcagccattgctaatgtgggcctcgccctgcactgggcgcagaaagccctgccaaagccactgccattcccaccactgcgtagatggagactgggtgggaggggtgaggcctctgtcccggggctcagtttccccagccttaccgatttctgaacgagtctatctgcggctccccctggtggctcaagatggaatagcaccctgccctttgtgttttggggagactttttttttttttttgagacggtgtctcactttgtcacccaggctggaatgcagtggcgcattctgggctcacttgaaacctccgcctcctgggttcaagcgattcccctgcctcagcctcccgagtagttgggattacaggtacctgccaccacacctggcaaattttgtatttttagtagagacggggtttcaccatgttagccaggctggcctcgaactcctgtcctcaggtgatccacctgcctcggcctcccagaatgctgggattacaggcgtgtgtcactgcgcctggcctgggggagacttttgagtctttttgaggtgacacctggagactgcacaatcactggggcaggccccccacaacacccaagagtggcatacttaggtgtccaggtcccacccggctacagttgggggtggtgggtctccatttatcaccaactcccatcagaaacgggcctgagaagcgtctctgtggctaccagagttttcccagtttaagttctcacatatatttgtgttgtcatttcctttttttgagacagagtctcgctgttacccaggctggaatgcagtggcaaaatcacagctcactgcagcctcaacctccttgactcaagcgatccttccacctcagcctcctaagtagctgagaccacaggtgcatgccactaccatgctcagctaatttgttaatttaggtttttggtttttttggtttttatttttttgagatggagtcttgcactgtcgcctgggctggagtgcaatggtgcgatcttggctcactgcaacctccgcctcccaggttcaagtgattctgccccaccttcccaagtagctgagtttaacaggcgcttgccaccacgcctggctaattttttgtatttttatttttattattttttgtttgtttgttttttttgagacggagtctcgctctgtctcccaggctggagtgcagtggcccgatctcggctcactgcaagctccgcttcctgggttcacgccattctcctgcctcagcctcccgagtagctgggactacaggcgcctgctaccacatccggctaattttttgtatttttattggagatggggtttcactgtgttaacctggatggcctcgatctcctgaccttgtgagccacctgcctcggcctcccaaagtgctgggattacaggcatgagccactgcgcccagctagttttttgtatttttagtggggacagggtttcagtatgttggccaggctggtctcgaactcctgacctcatgatctgcccacctcagcctcccaaagtgctgggattacaggcatgaaccactgtgcccggccttcttttttgctttttttggagatggagtctctgtcacccaggctggagtgcagtgtcaccatcatagctcgctgcagccttgaactcctgggcaatccttctgcctcagcctcccaaggagctacagatttccccttttaaaagcacacaagccatgtggattagggcccaccctaatgacctcattttaactcgatgacctctgtacacaaccctgtgtccaaataggatcatatcctggggtactggtggttggcactggggagacacagttcaccccatgacatagtgcatgatctcatgacatctctttgtgaaacctctcagtggcttattggcccattttatagatgaggaaagctgaggcccaggccaatcaagaatatacagcatgccatcatttcttggttcattctacaagcaattactgagtgcctgctgtgtgccaagcccctgtgttgggcactaggggcccagtgtgagcagacatacctggtgtccttcccaaagggctcacaacagacaggcacagggccagggggttagggcagcaaggatgcgagctttggtggtgcaagtccaggtgctgctggggcccagaggaggtgcctggctcagcctagggaggtgggagtggggagggtgacccccatgcccagggcatcatagctgagaagtaacgttacagagcagggaaaggaagggtatttcaagcagggatccagcatgtgcaaaggccctgaggtaggaatgggggttctttgggttggcaggggcatagaggtggggctggggggtagagtgaagctggagcatggggcgtggccagggcttagaggcagggttgggggcggagtgaagctggagcccagggcgtggccacggctgagagtcggggctgggagcagggtgaagctggggcctggggtgtgaccaggacttagaagcggggctgggggtcggagcgaagctgttgcatggccagggtttaaaggtggggctgggggggtgcagggtgaagttggagcctggggcatggccagggcttagaggcaaggctgggggaggctgtggggtgaagctggggcctggggcgtggccagggctgagtggtgcggctggggggcaggttgaagctgtagcctggggtgtggccagggcttagaggcggggctaagggcagggtgaggctgggacctggggcgagtccagggttgagtagcggggccttgggcgcggtgaagctggggcctggggtgtggccagggctgagaggcaggactgggggcggggtgaagctggggcctggggtgtggccagggctttgggctgctgtgcagggttcaaatgacatgggaggggctcctagagggcagcgctgatgtgggcggagccaggtcgactttgtgggccgagccagtctgactgggagccatggagtgggtggggaaagcgtgttggagagaggctggaggctccttaccccagcgactcctcaacgtctgtgccccacagtgaagcacccgcccgcagagccctcccgcttcatctcggctcccaccaagacaccggacaagatgggcttcgacgaggtgagctgggccttccctggaggcggggcgggggctggagggcccttgtttgcaggggctgatctggctggggactctccgggctgcaggtcttcatgatcaacctgaggcggcggcaggaccggcgggagcgcatgctgcgggcgctgcaggcacaggagatcgagtgccggctggtggaggccgtggacggcaagtgagtccgaggcctgggggtgggggggcgggtccgcacgtggatgtgggtgtagacctcgctggtagacggcaagtgattcagatgggggcgggcgtggtgtccaaacagatgtagacctcgtcagtgggcgtcctgaaggggaagtgaatgggaccctggggaaggggcagatcctcacagttgtagaccatggaaggcaagtgagtcctgacccaggggaatgggtaggtttgcatgctgccagtgtagactggtggggactgtggaggggtaagtcagtcagaccccaggagaggaggagagcaggtttgcccgcgagtgtataccatgtgcaggtgagtgaggccccatgtgcccggaaggggtgccagtgctacaagaggtggaccagctgctcaacgccgcagggggtggtggaatggccggggatggcagaatggcaggcagggtgaaccttcttcgtgaccctctcctcctcctctccagagccatgaacaccagccaggtggaggcgctggggatccagatgctgcctggctaccgggacccctaccacggccggcccctcaccaagggtgagctgggctgcttcctgagccactacaacatctggaaggaggtgtgtcctgagtgatgggcggggccagagttatgactctagatctcatcggagatttggacgggaaaggggttgaaagagttccccaaagccccggctaggcatccagcctcagccatgggacccatggcctctctttagtgaatgatgcgccacaccagctgtatcacccccaggtgtacctgccatccttccattgcgcaaatgtggaaactgagcctgggggtaggggtgagcccttttgagcagcaggtggtgtctggggcctgggacctgtaaacaaatcctcattactcccagcctggtctctgtgcttgatgtttagtactagaagtcatggccacagagccactttaaaccagcacctgcccagtgctgctgggggcactcaccagcccaggcatcctcatccaccctcagagggagaggctgtgattggaggagggtgtctgactaggcttcgaacttgggccatcagggccgggcatggtggcgcacacctgtggtcccaactatttgggaggctaaagtgggagagtggcttgagcccaggagttaaggctgcagtcagccaagatcgtgccactgcactgcagactggacagcagagcaaaaccgtgtctcagaaaaaagaaaaatggctgggcgtggtggctcatgcctgtaatctcagcactttgggaggccgaggcaggcggatcaccttaggtcaggagttcaagaccagcctggccaacatggtgaaacctagactctactaaaaatacaaaaattatctgggtgtggtggtgggcacctgtaatccctctacttgggagactgaggcaggagaatcacttgaacccaggaggcagaggttgcagtgggctgaaatcatgccattgcactccagcctgggcgacaagagtgacactccatctcaaaaaaagaaaaataaaatccgggcgtagtggcacatgcctgtaatcccagctgctcaggaggctgaggcagaattacttgaacctgggaggcggaggttgcagttgagatcgttccactgcactccagcctgggcgacagggcgagactccgtctcaaaaaaaaaaaaaaagaaaaagaaaagaaaaacttgttatcgaatgtgaagccaaatgggggtgtgcggctgcaaggcgggaggtgcatgaggcgtgggcatttgaggggctgggaggcctttctcttctgagatccattatggacggcagagggcagaggtttggatgtccagatgtccctggagctaggagaggcagggagatgcactggcttctctacgggtctttcaaaccttctcaaagcaaagctctgtgctttagggtcaggcctggccttggcctccctgtgatgtggcggggcttcctccctcaggtggtggaccgggggctgcagaaatcgcttgtgtttgaggatgacctgcgttttgagatcttcttcaagagacgtctgatgaacctcatgcgggatgtggagcgggagggcctggactgggacctcatgtgagtgggggtctgaggatggggtgaagctggggcctggggcaaggccaggacttagaggtgggggtgggggcagggtggagctgggacctggggatgggtcatggcttagaggcggggcttgaaggtggggtggaactggagcctaggtacatggccagggcttagaggtggggctgggaggcggagtggagctgaatcctacgggcgtggccacagcgctgcagctgagcctagagcctgtatgtctgggtgtggtcagggtggcaggcgtggccaacccttggaagcgtagcaggagggctcacgtggttcctgggcctgaaggcactgtcagggctgtagcctatagggaagggcgttggaaggatcacccagaactcaagggacctggccggaagcctgcaggcttggtcaaggcttagagacttgactgaggcctgtggaggtggatgtggctaaaatttgaccgggcagcctgtgggcgtggctgaagagcatgggggtgtggtcagagctggaggtgtggccgaagagtgtgggggcgtggccagggcgcctggtcttagacaagcccctggatgggagtgccaccaacatgtttccagcactggagccgtccttctcttctgtaagtgggctggtttgtcctctcccttcctccatctcttttttcccttccatgtgcagtgccctaatctgcattctgggaacactgccccatgtgaatagtaactgcacccctccattcctgactgcccccccatcagggcacctcgcccacctccacccccactgtcctctgaactcagagcagcttcagcctcagagaacgtctgcgtgatcctgctctccccagctccagatcctccatggctccctcacgccctttggaaaaactcactcttctcccccatgaccgccagacccctgggctcctgcattcactccatccagtcacagagctctgcaaacatgctgagcctgctcccatcccaggacctgacggggtaactagatccctggctttctgggcaagctccctccggagggcgggaggagagtgacaggcccgatcttgcaccccagctatgtgggccggaagcggatgcaggtggagcaccccgagaaggctgtgcctcgcgtgaggaacctggtggaggccgactattcctactggaccctggcctacgtgatctccctgcaaggcgcccgcaaactgctggctgctgagccgctctccaagatgctgcctgtggacgagttcctgcccgtcatgttcgacaaacacccagtgtgagaggggcaggcggctgctgggctggggtttcacggtgggtctgtcctgggagaatggggatgtgagactcacggcctccgagaagatgtctcttcttttgcctacttctccctccgtttgccccctcgcagatctgtctccatttgtatcccctgcacacttacgttttaatctgtccccgctgacttcttcacccccaatttttcctccagctgtcccgtcccctgaagccattgctgcccctcactcccctcctcctccccccaggtccgagtacaaggcccacttctccctccgcaacctgcatgccttctctgtggagccgctgctcatctaccccacacactacacaggagacgatggctatgtgagtgacaccgagacctcagtcgtatggaacaatgagcacgtcaagaccgactgggaccgcgccaagtcccagaagatgcgggagcagcaggcactgagccgtgaggccaagaactcggacgtgctccagtccccactggacagtgctgcccgggatgaactctgaggggtagcagccagaaagccaaagcagccatcggtggcccaggctccacgtgcttactgaggacatcaggtccacctctggaccccttggcaggccacagagggctctcgtgtggggtggtgtccagccagctcttgctaagcaatcacgtgcacacaggcagcattaatggagtgcctactgcatgccagcaacagggcttggccctggggaattgggaggaaccaagccctcttcatctgttcatgtgcccagcatttattaagcacctgctgtatgcaaggttcccatgttacggcagtgaatgaggcataattgttccctccatcagcgattgattcagtcatcaagcagttactgatcagattaagaatcaggcactagtgatacacattcatttttaaaattcattcaaggatttattgagtgcctactgtgtgttgggtgccattccaggctctgggatttttttttttttttttttaagagtagagtctgtctctgtcacccaggctggagtgcagtggtgtgacggctcactgcagcctgcgcctcccagcgtccagcaattcttgtttctcggcctcccaagtagctgggactataggtgcgtgccatcacatctggctagtttttgtatttttagtagagacggggtttcaccatgttggccaggctggtctcgaactcctgacctcaagtgatctgcccgccttggccacccaaagtgctagggttacaggcatgagccactgtgcccagcccaggctctgggaatattgagataaataagatgcttctatccatttattcaagcacatattggtcacctactgtgtgcctggcactcatgtcacaaagataagttcctgattcggtacacttactgagcacctgctgtgtgcagggagctgagctatgggatgggaatgggagtaaacaaggtactttttacttttttctttttttcctcactgctagacggtgtgggaacttctcactcattggcttctttcccacacacctgaagagcactgactgtgtgccgggcactagtgatacaaaagagtgtgacagttgttcagtctgcattttcgatcatgggctacatgccgagtgctggggcacagagatgaacaagatcggttccttcacttcttcatgccacaagtgtttattgagcacctgtgtgccaggcctcacagactcccagttgggttgaagaatggttgactgagtttgattcttcctgtaccctcggtcgtctgagctgtgtgcagacaacatccccccaccacccaagagggagggtagctcttccgccaccaggggcaagcacaggtcctggtggccccacgccacatgttagcccccctggagggggcgccagttggagacgggggctgggtgtccctggcccactcccggtcccctgtgctttacctccttgcccttgtgtctcaggtgtggtccctgcctgcttgatgaagttgctctgttcaagcctttggtgggatcatgtgtttgggggcttttaggggacccagctgcactggggcactgcccgtggcctgggtaggacatttcccagcaagggctggaggagttgccgtgccttcagcctgaatcgaatgtcagaaccagccagcggtgcttcaccctcttggggataacttgcttagttttttaataaatgttcctggttggttttcacagcagtttgtgggattttgctcggcaccaaaacactgcccacgttccccacccctggatggccgacaagatttgggaggaaaccagggcaggtgcagtagggaagctgcccagtggggcctggcatggtggctcatgcctgtaatcccggtgctttgggaggctaaggtgggcggatcacttgaggtcaggaattcaagaccagcctggccaacatggtgaaaccccctctctattaaaagtacaaaaattagcctagtgtagtggggcggggtggcggggggggggtacctgtaatcctcgctacttgggaggctgaggcaggagaatcgcttgaacctgggaggtggaggttgcagtgacccaagattgagccactgccctccagcctgggcggcagagcaagacacaatcaaaccaaaaaaaaaaaaaaaaagctggccagtggagctactgtggggtgagggtgtggtaagagccctgtgtcccctcatgccataaaacttcccccaaacaggcgggggaccgacagctctgtcttgagtcaacttcaggatccttccacatgacttcgaataaagaggggctgtcgtgctttgagtccccctaaaacagacctcaacatgaggattagggctgggcatggtggttcacgcctgtaatcccagcactttgggaggccaaggtgggtggatcacctgaggtcaggagttcgagaccagcctgatcaataagatgaaatcccgtctctactaaaaatgcaaaaagcagccaggcatggtggtgtgtgacagtagtcccagctacttgggaggctgaggcaggagaatcgcttgaacgcaggaggtggaggttgcagtgagctgaaatcttgccactgcactccagcctgggcaacagaatgagactccatctcaaaaaaaaaaaaggattaggctgggtgaggtggctcactcctataatcccaatgctttgggaggttgaggaggtgagaggattgcttgaggtcaggagctcaagaccagcttgggcaacagagtgagaccctcgtctctacaaaaaaaattgagaaattagttgggcatggtagggcacacctgtaatctggctactcaggaggctgaagcaggagtatctcttgagtctaggaggttgaggctgcagtgaaccatgatcacaccactgcactccagcctgggcaacagagcaagaccctgtttctataaaacaaaaccagaaaacttccctgaaatagcccagggacaggtggccaacttcattctatcttggatcaaccacaggatcgtcgcagatgacttcaaatgaggaggggctgtcatggtttgggtcccctgaaacagactccaagatgaggattgaagggcacttacgttatcagtgaccccaggaacttgctgtggagcagtagggaagtgagacaagaagggaaagagtggtcccaccccagggagagggggctggacattacaacatgcccagttgcatttggattttctgggtcaaatgcttacaaatcctctggattattacacctttagggtgtgcaagaatatacccgagacttttataaactaacacaggggccaggcgcggtggctcacacctgtaatcccagcactttgggaggccgaggctggtggatcatgaggtcaggagttcgagaccagcctggccaatatggtgaaaccccgtctctactaaaaatacagaaaaattagctgggcatggtggtgagcgcctgtagtcccagctacttggaggctgaggcagaagaatcacttgaacctgggaggcggaggttgtagtgagccgagatcacgccactgcactccagcctgggcgacagagcaacactcttgtctcaaaaaacaaaaaacaaacaacaacaaaaaaccctaacactgatggtgttcaatcagtgtggaaaaaatcagaacttacagctaagcaaattgacaaagcaaaaattaaatcacaccttttcagacacaactaacattttcaaaaactttccagccttccttatttgcatggtgtaaatatatatgcattttttaaaaaaggaggaccatgttacctaagctactgcaacttgccgttttatttttcgtggaatgcacttttattttctaagcatgggatcaaactgtacctattttttaaaaaacaacttttatttttaaatttaacaactattgtggacctcctttccaaaatagggttaacatctacgagctctttttggattgttatggaaaatattccctgctgtttcctgcagtggatagcattatacaatacatctttcctactggattttttgtttttttgtgtttttttgtttgttttgttttgctttttgagacggagtcacactctgtcacccaggctggagagcagtgatacgatcttgactcactgcaacctccgcctcctgggttcaagcaattctcctgcctcagcctcctgagtaatagattacaggcgcccgcaccacacctggagaatttttgtatttttagtagagatggggtttcaccatgttggccaggctggtcttgaactcctgactacaagtgatccacccgccttggctcccaaagtgctgggattgcaggcgtgagccactgcacctggcttcctactggattttaaaatttcagttgggtaaattgagacaggtgggattcctggattaacctggatgtgcacttcaggtttcagtagaggctatcatattcctttttcttattgaatcctaactattcatcatctattggccagagtgaattatccatgtttattaaacagtcccttctgtgaaacatttttttttctttgaggcagagtctcactctgtcgcccaggctggagtgtagtggcatgatcttggctcactgcaacctccgcccccaccctgggttcaaacaattttcctgcctcagcctccctagtagctgggattacagacgcctgccacaatgcccggctagtttttgtacttttagtagaaacagggtttcaccatgttggccaggctggtctcaaacttctgacctcaggtggtcctcccgcttcggcctcccaaagtgctgggattacaggcatgagccaccgcacccagccccttctgtgaaagatttttttctcatgctttgcagggaagtttctaaatcttatttaacccagtgaggctcaaccaggagtaattttgttcttcaggggacatttggcaatgtcccctaaacatcctacaatgctaacaccatcctacattgtacatcctatgcaggaggatgcagctaaatatcctacaatggccaggacgccccaccatacagaacgttccagtccagaatgttcatagtgctgagactaagaattcctgtacccggccaggtatggtggctcgtgcttgtaatcccagcactttgggaggttgaggcaggcagatcacttgaccctaggagtttgagaccagcctgggcaaaaccctgtctctacaaaaaaatagaaacacttagccatgtgtgttgtcacgtgtctgtgccccccagcctcgggaggctgaaatgggaggattgctggagcctacgaggttgaggctacagtgagcagtgattgtaccactgcactccagcctgggctacagagcgagaccctgtctcgaaaaaataaaaataaaaaaagaatccctgtacccaattcctttcagcctcttggggacatgagtctttagaaggatcttctctgtggtacgaagtgaagcttcctttactatgaaatttatctgaataaagcatagattcgcaggctctgctcacagactaaaggattagaacttggaggtagctgggtgcagtggctcacacctgtaatcccagcaatttgggaggccgaggcgggaggatcacctgaggtcaggagttcgagaccagcctgaccaacatggcaaaaccctgtctctactaaaaatacaaaaaaattagctgggcgtggtgacgcatgcctgtaatcccagctacttaggaggccgagacaggagaatcgcttgaactggggaggcagaggttgcagtgagccgagatcgtgccattgcactccagcctgggcgcaaaactccatctaaaaaaaaaaaaaaaagaacttggaggtgatgcctgggaattaaattttattttgaaggcccccaaacagttatgtaactctggtgttgcttttgacctctgcaccttcaggagaacctcatccttccttctggaactttctaaatacacacacacacaatgtatacttttcttgtctttgtaaaaattttattattactattttctgagacagggtctcgttctgttgcctaggctggagtccaatggtgcaatcatggttcactgcagcctcaagctcccaggcttaagtgatcttcccacctcagcctcctaagtagccaggactacagacatgagccactatgcccagctaattttttattttttgtagagatgacggtcttgctatgttgcccatcctggtctcgagctcctgggctgcagcaatcctccccgctcagcttatcaaaatgctggaattacaggcatgagccactgcacctggcacctttattttatgaatgctatttttaattgtaaagtgattcttattcatggggacacccttcagttggtctattggctattagttccctattgctactctaacacatttccacaaacttagtcgcttaaaacaacatcaatgtattcttgtatggttttgaaggccagaattctgaaatcagtttcactgggctaatgtcaaatcaagctgaggctgggtgcggttgctcacgcctataatcccagcactttggaaggctgaggtgggtgggtcacttgaggtcagcagttcgagaccagcctggccaatatggggaaatcccatctctactaaaaatacaaaaattagctgggcatggtggcacacacctgtagtcccagctacttgggaggctgaggcaggagaattgaggagaacccgggaggcggaggtggcagtgagctgagataggggccattgcactccagcctgggcaacagagcaagactctgtctcaaaaaaaaaaaaaaaaaaaaatcaagctgggtgcagtggcacacacctgtaatcccagctaccctgtaatcccagctactcgggaggccgaggcaggagaatcgtttgagcccaggagttcaagatcagcctgggtaacatagtgagacccccatctctaaaaataaataaataagtaaaaataaattcaagtcagcagggttggtttcttctggaggatctaggggggaatccttctctttgtcttttctggcttctgaaacccactggcatcttttttgtttttttttaatttttttgagactaagtccagctctgtcaccctggctggagtgcagtggcacgatctcagctcacagcaacctctgcttcccaggttcaagtgattgtcatgcctcagcctcccgagtagctgggattacaggcgcccaccaccatgcccagctaatttttgtatttttgatagggagggggtttcaccattttggccaggccggtcttgaacgcctgacttcaggtgattttcctgccttggcctcccaaagtgctgggattacaggcatgaaccaccatgccccatccccactggcatctttttttttatgctttaaacaatttttttttttagaattcaaaagcaaactctggatcctgagcttaactgtaatggagtagattacattccatttatttttgtaaattattttattttttcattgatgacttagagggactatcttcaaaccagtacaaatatttcatagataatacctggccaatttctaaccaattgagtaatttgttgcataataagctacctcaagtctttcagcaagaaatacattaaatttgaatagtgaagacattacacaatgaattaggacataattaaaatttgctttaaatatttctttggtggagagaacaccacacttctgctcaatgaagagaaacattttcatactccagaggcattttattttattttattttatttttttgagacggagtctcgctgtgtcgcccaggctggagtgcagtgacgtgatctcggctcactacaacctccgcctcccgggttcaagcaatgcttctgcctcagcctcccgagtagctgagactacaggcacctgccaccatgcccggctcatttctgtacttttagtagagacggggtgtcaccatattggtcaggctggtctcaacctcctgaccttgtgatctgcctgcctcggcctcccaaagtgctgggcttacagatgtgagccaccctgcctggccttttatttttttgttaacacctattatgtcatgaattcatagggaagaggttccagcagctaaggctccttcccactggttttcacacagtgtgcttctctgggtggagcaggctggcgcttcagttgaacccaggcacctttctctttggcttctttctttttctgatcattttccttcatgcatttcaggaagctatctcagttcttagagtgcttaatatgctcaatacacacatcaattctcttggcaaggatcttgccctcgtttgtttacaacaatgccaacagcatgctggggaacactgtagattcttccagttttgccatgttaacacttgtggagcatttctttttgaacagtaccttctcttgatgtctacaatatcacctttcttatagattcacatatacgtggccaaaggaacaacttcatgttttctaaaaaagcctagagaacatatatcgggtgcctctcctcttttcctttgtgtttgtcatcttggcaaattactggaagatggcggttctggccgaaaagccccactggtatcctttgcttgtggtcccttcttgtgtcactccaagtcactccaatcctttcaatgctatgtattcacctaacctcttgtctccctcttctaaggacatttgtgattacatttagagcccattcagatgatccaggataatcttgccataatctcaaaatccttgacttaatcatatctgcagggctgggcatggtggcacgtgcctgtagtcccagctgtgaaagaggctgtggtgtgcagtaggattgcttgagcccaggagtttgaggctgcagtgagctatgattgcacctctgcactccagcctgggcagcagggcaagatcttgccaaaaaaaaaaaaaaagaaaagaaaagaaaagaaaaatcacatctgcatctacaaaattccttttgccatttaaagtaacatccatagggccaggtgcagtagctcatgcctgtaatcccagcactttgggaggctgaggtgggtggaacacctgaggtcaggagttcaagaccagcctggccaacatggtaaaacaccatctctactaaaaatataaaaattagctgggtatggtggcaggcgcctataatcccagctacttaggaggccgaggcaggagaatcgcttgcacccaggaagtggaggttgcagtaagctgagatcgcgccactgcactccagcctgggcaacaagagtgaaactccgtctcaaataaataaagtaacatccacaggttctgagcaatagatgtggatatctctcgggggacattatttagcctattgctacagtatcctttggagaggctgagattgtgtcttgctctatggatgtgtcagtcatatgatacatagttatgtatcatagtacagtgtatcagtcatggatcaaggtgggaaaacagaaatcacttgaggtcttttaacagaaaggggtttcatataggaaattgacaatgactccatgctgccattgcagcctgaaaaacaaccacaggcaatacataaatgaatgagcttggctgtgtgccaataaaactttatttgcaaaaaccagtgtggagtcagatttggcctgggggctgaagtttgccatctctgggtacaaaggatcaggactgagtctggtcctacagagatgaccttgaagaagtggctttccaaagcgccccgaggttgtcactgaacagaggaatgctaaaacctcaactgtttccacatctggctgctggcagagtgaaggggaaggaaaaccaagacgactcaagtcccttttgttttccagactcccagaggtgcatctggcaggtgaacttgggcagacaccctgagtctgcccagccacagggagatctgcctgtgtagctggggctttggaatggggtgggacaggggcggatgctgatgtcaacctgccatggatggcttattagcgtaggttacaatgatgatagggacgacggtgtaactgtaggatgcataatcatcgtcactattacatgtaattgcaggatttggagcagagtaattatcatgcaatataatcaattatataatgaaatgtaatctcagacagatcatcaacgacataattgtgttatgccctccaggaaatggaatatgcctctttttgaagttcccgggtggttctgccaggatggctggtggtgggagaagaaggcaagagccaaatggggttaggatgagagggacagtgattggggtgggggtgtttcaggtgacagtggaaggatagtgatgggcgtgagaatagtgtgagagtttagtctgaggttgagagaagtgaggagatgcaggcgaataagttgaagaacaatgaggtcaggttagggattagcaaactggatgagggccaaatctgacatctgacttttttttttttttgaaacggagtttcactcttgtcgcccaggctggagtgcaatggcgcgatcttggctcactgcaacctctgcctcccgcattcaagcgattctcctgcctagcctctggagtagctgggattacaggtgtgtgccaccatgcccggctaatttttgtatttttagtaaagatggggtttcaccatgttgtccaggctggtctcgaactcctgacctcaggtgatccacccgccccggcctcttaaagtgctgggattacgggcgtgagccaccactcctggcctcaaatctgacttgttttaaaaaaaatttggcagggctgggcaccgtggctcatgcctgtaatcccagcactttgggactcacctgaggtcaggagttcgagaccagcctgaccaacatggtgcaaccctgcctctaataaaaatacaaaaattagtcgggcgtggtggcacacacctgtaatcacaggtactcaggagggtgaggcaggagaatcacttgaacccaggaggcagaggttgtggtgagcggagatcgtgccactgtgctccagcctgggcgatagagcgagtctccctcttaaaacaagcaaacaaataaaacaaacaaacaaaaccccaaaaattatttggctgaacacggaatctggaaaaaaaaatttttaaattgaggtaagaatcagacaacataaaattaaccagattaaaatgtccaatttggtggaatttagcacatttgcaatgtcacacgaccatcacctttatcaatttccagaacattttcatccccctaaaaggagatctcgtttctatcagcagtcactctccactccctctcccccagcccctggcaccaccaatctgcttcctgtctctatgtgttcccggaaaggggtcctgatcaagaccccaagagagggttcttggatcttgtgcaagaaagaagtcagggaggccgggcgcggtggctcacgcctgtaatcccagcactttgggaggctgaggtgggcggatcacgaggtcaggagattgagaccatcctggctaacgcagtgaaaccccgtctctgctaaaaatacaaaaaaattagccgggtgtagtggcgggcacctgtagtcccagctactcgggaggctgaggcaggagaatggcatgaacccaggaggcagagcttgcagtgagccgagattgcgccactgagctccagcctgggcaacagagccagactctgtctcaaaaaaaaaaaaaaaaaaaaaagaaagaagtcagggtgagtccatagagtaagtgaaagcaagtttattaggaaagtaaaggaataaagaatggctactccaggccagacacagtggctcacgcctataatcctagcactttgggaagccaaggtgggtggatcacgaggtcaggagactgagaccatcctggctaacacggtgaaaccctgtctctactgaaaatacaaaaaattagctgggcatggtggtgagcgcctgtagtcccagctactcgggaggctgaggcaggagaatggcatgaacccagtgtcaggcctctgagcccaagctaagccatcatatcccctgtgacctgcatgtacacatccagatggccggttcctgccttaactgatgacattgtcttgtgaaattccttctcctggctcatcctggctcaaaagctcccctactgagcaccttgtgacccccactctgcccgccagagaacaacccccctttgactgtaattttcctttatctacccaaatcctataaaatggccccacccttatctcccttcaaggactctcttttcagactcagcccacctgcacccaggtgattaaaagctttattgctcacacaaagcctgtttggtggtctcttcacacagacacgcatgaaatttggtgccgtgactcagatcgggggaccttccttgggagatcaatcccctgtcctcctgttctttgttccataagaaagatccacctacgacctcgggtcctcagaccgaccagcccaagaaacatctcaccaatttcaaatccagtaagcggcctattttcactctcttctccaacctccctcactatccctcaacctctttctcctttcaatattggcgccacacttcaatctctcccttctcttaatttcaattcctttcattttctggtaaagacaaaggagacatgttttatctgtggacccaaaactctggcaccggtcacggactaggaaggcagccttcccttggtgtttaatcattgcaagaacgcctctctgattattcacccacatttcagaggtgtcagaccatgcagggatgcttgccttggtccttcacccttagcggcaagtcccgcttttctaaggggcaagaatccccaatcccttatttccatgccccaacctcttatctctgtgcctcgatcccttatttccatgccccgacctcttatctctgcgccccatcccttatttccgtgccctgacctcttatctctgtgccccaaccccttatttttgcaccctgacccctttctggcttttctggaaggtaagaacccccaaaccccttccctctgtgtctctactctctcttttctctgggcttgcctccttcactataggcaaccttccatgctccactcctccatctcccttagcctgtgctctcaagaacttaaaacctctttgactcacacctgacctaaaacctaaatgccttgttttcttctgcaatgctgcttgaccccaatacaaactcaacagtggttccaaatagccagaaaacggcactttcaatttttccatcctgcaagatctaaataattcttgtcgtaaaataggcaaacagtctgaggtgcctgacgtccaggcattcttttacacatcggtccctccctagtctctgtgcccagtgcaactcgtcccaagtcttccttctttccgtctctcctgtcccctcagtcccatccccaagcgtccctgagtctttctaatcttccttttctacagacccatctgacctctcccctcctccccaggctgctgctcaccaggccgagctaggtcccaattcttcctcagcctccgctcctccaccttgtaatctttttatcacctcccctcctcacacccggtccagtttatagtttcattccgtgactagccctcccccacctgcccagcaatttcctcttaaaaaggtggctgaagctaaaggcatagtcaaggttaatgctcctttttctttatccgacctctcccaaatcagttagcatttagactctttcatcaaacatgaaaaacccagcccagttcgtggctcgttcggcagcaaccctgagacgctttacagccccaaaccctaagaggtcaaaaggctgtcttattctcaatatacattttattacccaatccactcctgacattaaataaaaccccaaaaattaaactccggccctcaaaccccacaacaggacttaattaacctcaccttcaaggtgtacaataataaagtagaggcagccaagtagcaatgtatttctgagctgcagttccttgcctccactgtgagacaaaccccagccacatctccagcacaaaagaactccaaacgcctgaaccgcagtggccagggattcctccagaacctcctccaccaggagcttgctacaagtgccggaaatctggccactgggccaaggaatgcccgcagcccaggattcctcctaagccgtatcccatctgtgtgggaccccactgaaaatcggactgttcaactcacctggcagtcactcccagagcccctggaactctggcccaaggctctctgactccttcccagatcttctcggcttagtggctgaagactgacactgcccgatcacctcggaagccccctagaccatcacggacaccgagcttcaggtaactctcactgtggagggtaagcccatccccttcttaatcaatatggaggctactcactccacattaccttcttttcaagggcctgtttcccttgcctccataactgttgtgggtattgatggccaagcttctaaaccccttaaaactccccgactctggtgccaacttaagacaatactcttttatgcactcctttttagttatccccacctgctcagttcccttattaggccgagacactttaactaaattatctgcttccctgactattcctaggtgacagccacaccacattgccaccttttcccccagttcaaagcctccttcacatcctccccttgtatctccccaccttaacccacaagtataagacacctctactccctccttagcgaccgatcatgcaccccttaccatcccattaaaacctaatcacccttaccccgatcaatgccaatatcccatcccacagcacactttgaaaggattaaaacctgttatcattctcctgttacagcatggccttttaaagcctataaaccctccttaccattccctcattttacctgtcctaaaaccagacgatgcttacaggttagttcaggatctgcgccttatcaaccaaattgttttgcctatccaccccgtggtgccaaacccatatactctcctatcctcaatacctccctctacaacccattattctgttctggatctcaaacatgctttctttactattcctttgcacccttaatcccagcctctcttcgctctcacttggactgaccctgacacccattaggctcagcaaattacctaggctgtactgccgcaaggcttcacagacagcccccattacttcaatcaagcccaaatttcatcctcatctgttacctatctcggcataattctcataaaaacacacgtgctctccctgctgatcgtgtctgattaatctcccaaacctcaatcccttacaaaacaacaactttccttcctaggcatggttagtgcagtcagaattcttacacaagagccaggaccgcaccctgtagcgtttctgtccaaacaacttgaccttactgttttagcctagccctcatgtctgcgtgcagcggctgccactgctttaatacatttagaggccctaaaaatcacaaactatacttaactcactctctacatttctcataacttccaaaatctatttgcttcctcatacctgacgcatatgctttctgctccccggctccttcagctgtactcactctttgttaagtcccacaattaccattgttcctggcccggacttcaatctggcctcccacattattcctgataccacacctgacctccatgactgtatctctctgatccacctgacattcaccccatttcccgatatttccttctttccttttcctcaccctgatcacgcttgatttattgatggcagttccaccaggcctaatcgccacacaccagcaaaggcaggctatgctatagtacaagccactagtccgcctcttagaatctctcatttcctttccatcgtggaaatctgtcctcaaggaaatcacttctcagtgttccatctgctattctactactcctcagggattattcaggccccctcgcttccctacacatcaagctcgaggatttgccccactcaggactggcaaattagctttactcaacatgccccgagtcagataactaaaatacctcttagtctaggtagacactttcactggataggtagaggcctttcctacagggtctgagaaggccaccgctgtcatttcttcccctctgtcagacataattcctcagtttagccttcccacctctatacagtctgataacagaccagcctttattagtcaaatcagccaagcagtttttcaggctcttggtattcagtgaaatctttatatcccttacagtcctccatcttcaggaaaagtagaacggactaaaggtcttttaaaaacacacctcaccaagctcagccaccaacttaaaaaggacggacaatacttttaccactttcccttctcagaagtcagacctgtcctcagaatgctacagggtacagcccatttgagctcctgtatagatgctcctttttcttcacatggacgcccatgaaacccgggaggtggagcttgcagtgagccgaaaccgcgccactgcactccggcctgggtgacagagcaagactccatctcaaaaaaaaaaaaaaaaaaaaagaatggctactccatagacagagcagccccaaggctgctggttgcccattgttatggttatttcttgatgatatgctaaaggaagggtagattattcatgccttgcgtttttagaccaaatagggtaacttcctgatgttgccatggtatttgtaaactgtcatggtgatggggggagtgtagcagtgaggatgaccagaggtcactcttgtcgccatcttggttttggtgggtttgggccagcttctattattgctgttgttgttgagacggagtcttgctctgtcgcccaggctgcagtgcagtggcgcgatctcggctctctgcaagctctgcctcctgggttcacgccattctcctgcctcagcctcccgagtagctgggactacaggcgcccaccaccatgcccggctaattttttgtatttttagtagagacggggtttccttcctttttttttttttttttttgagatggagtttcactcttctcacccaggctggagtgcaatggcaggatctcggctcactgtaacctctgcctcccaggttcaaatgattctccagcctcagcctcccgagtagccgggattacaagcacttgccaccatgcccggctaattttgtatttttagtacagacagggtttcaccatgttggccaggctggtcttgaactcctgacctcaggtgatccactcgcctcagcctcccaaagtgctaggattacaggcgtgagccaccgcgcccggccacttccttcctttttatggctgaatcatattcattgtatgaatagacaacatgttgtgtttatccattcatttgttggtggacacttgagttgtttccaccttttggctattgtgaatagcgctattctgaacacgtccaagggtttgtttgaatatatccgcttgattttctaaataaagttttattggcatgcagtcacgcccatcatttgcatgttgtcaaggttacaatggccgagttggttgcaacagagacagcatagtacacacagcaaatctatttactagctcgccctttacagaaaattttgttgacccctgtattgatcatgaccaaaatgagtctgggaattgggttgggttgcagaaactttacattaggcctggatgaccattctcctctccttctacctgtccagaacaaaggggttacatttcccagcaagcagtcttgagcctcagtccccaagccccattggtaacacgatgggtcccacacactgaaggacaagacttgagacccttttgtagcgaggggcaaatagatccacatcagtcacagtgcgtagcctatgcacttgggtacagaaacagctaatgagcaggggcactcaaggacctgcaggctgcctctgcagacatcatgcagacagctgcggtttgtccccttttcccagctatatgctattctttgagaagataccacacccccacgtgcaagtttctcaaaggagaaaagtcccccaggagcgggattgctgcgtgctggataactcctggtgtaagccactttctggccccacttttagtcctgctgtctgttacttgcaaccaaaagcactcactgaacccactcctggtggtggatcccgcagctcccgtcctgtccgctcaaatgtagaaataaccccagacataaggaggggaatttcggaatttaccgaggaaactgggctgaatgagattccatttctgcttcctcgtgggatggagactcaaaacagaaattaaattcagctgttggaaaatggagtttcattcctcacacatctgagtttatgaaatgagattcccagctgctacttttttttctttttttttttttgagatggagtctcgctccgtcacccaggctggaatgcagtggcgtgatcttggctcactgcaagctccgcctccccagttcacaccattctcctgcctcagcctcccgagtagctggaactacaggtgcctgccaccgtgcccggctaatttttggtacttttagtagagacggggtttcaccgtgttagccaggatggtctcgatctcctgacctcgtgatccacccgcctcggcctcctaaagtgctgggattacaggcgtgagccactgcgcctggccccagctgctacatttaaaacagacatggccaggcacagtggctcacgcctgtaatcccaacactttggagggctgaggagagaggattgcccaaagtgaggagttcgagagcagtctgggcaacatggcgacatcctatcactacaaaaaatacacaaattagccaggtgtggtggtgcacactactcaggaggctgaggtgggaggatcacctgagcctgggaggttgaggatgcagtgagttgagattgtgacactgaactccatcctgggtgacagagcaagaccctgtctcaaaaacaaacaaacaagaagatcccaaaaaacccaacaaaaccaaacaagcatgggggtgtgggttgaattaagggcatgtattcctagtgtttgtatcttaacttccttaagggcaacagatggccgggtgcggtggctcacgcctgtaatcccagcactttgggaggccgagggagtggatcacctgaggtcaggggttcgcgaccagcctggccaacatggtgaaatcctatctctactaaaaatacaaaaattagccaggcaaggtggcgggcgcctgtaatcccagctactcaggaggctaaggcaggagaatcgcttgaatctgggaggtggagattgcagtgagctgagattgcaccactgcattccagcctgggcaacagagacttcatctcaaaaaaaaaaaaaaaaagcaatggttgcaaatgttctgagttcaagtcccagctccatctcttcctggctatgtgatctgagcaagatcttgtctctctgtacttcagtttccttctctgtaaaatggggatgactccagttgcggatgagccgcgttcatgggcaagcagtgtgttctactgagtctgcgcctacctagtaggtgctaatcgtacgtgaggtttttgtttttgtttttttgctgataaaggaatgcaaggaggaggcaaccacgtgtccaaggctgtgtgtggtttttctttttttaatgtctgctgttaataaaatatttttacagagaccaaaaagtcagaatagtgcaaaacatctcaacaccatgcattcatgaccacttctcgtttgtgttaaacatttgttccaagtcacatatttacagagaaatgaaggcgtctgtgcagacactggaccgacggggtagaatcaaaacaaaacaaaaaacaaacaacgttttgatttcacatctgcaatcacatgctaagagttgtgtggaggggaagcctccccggactgcttggccggtttgtgggggtctgagggagcacgagacaggggtggacaggggtcaagtccccctggctgtgtggttggggatgatcaggggaccctccgcctgtgacctgtgtctccagagagccactatggctggacgggggtaaggggtggggtgttacttgacacagtcaacttgatttttctctgaaacaataaaaggcaaagagaaaagcaacacgtgtcagcaaagacaactttggtcctcaacgattcttaggaaaggattctggggagcagacggggttgtgatccgggactaaggccctcccccaacttccccagggtggcagagttccgggaggccccaggttgtccccatctgcaaaatcgacagcacatggggtaggggtaggggacagaaaggctctgagatcccagccgagagaggtcccaaggatttctagttgggtgtttagttttttgcatctctgatgggggcatggtgaggtctcaggctctggggcctgagagaggaattgggggtgtggacaggcacctcctcattttatgcaaatcattcgaggacagactggtaagagtgaacagatccttctttcttcaggacaccctctttacttcccccgacactccctgccttggtctctgcatttatctttctctgtatatttccacctctatgtctctctccatctctgtctctctccgtcctcatcggggcgtgatctcaccctctgtctctgtgttttctactctattcctcttggtcaggggactttgactctgaggcatccctcaatgtcacccctttaacccttgccctgccacaggccaaccttcttgtgctgtttccccgattcatggaaatgtggggccagctccttgcataaagcgaggtccagggttcagaaccctggaggtgtcatccaaggccgggctctgtgtccacttgctgggtggcgttgaggaaagccctgctcctctctgggctttgttctgccaatacaggaacttcctgatttcaaaaggctttcagccccctggactccttgtcttttctctgtccgtgtctcagccatgtccactctctgtcccatgtgtcaggctcagacacctcctatgtgcccaggtccgtgtggaaggggaaggttggtacggacagacatggacagacatgcatgcggatgtgtattctcacactgaccctgccccaatacataattccactaggcgtagactccctgtcacccacttgtgcccagcctgtgctaggtaaagttgggggtcctgagagtcctcagaccccagtctgggagaaacagagctggacagagaaacccccagtcccatggcatcaggctggactggaggagagacggtggctgggaaagtcctgaggggaaggaaggagggttttctccaagaggggtttccgtgatgggttttgaaggacgaataggagttctctgggggaaagaaaagagggtggaaattgcaaaaacagttctagcctgggagtcaggaaaactcattcaacaaatattccctgaagaagcttgtttccttcacatgcctgggccattgctggggaaccctaaacacacacacacacacacggaggtcttgaacagaaagactcctaaggaatcttttgggaaataacttggctctctcaggcagctcgacttccccatttctttccagccatccaaaaatcttccagatcaccctcaccccaggtcacagatcacttcccctttgggctctatgggttacaaccctgaatcatccatccacccgacccctaccctcagccatgtcatggttcgaaattcacatctgctcctcagtccatataacagtcacataagcttatccctggctacaacttcccaaccctgtatgagaatttgcattttaacctttggttcagaacctccagttacctgcacctgtctgaatttaagggacatgcaacatctccaagcaaattagaaagtggcgccacttcttccagacacttgggccattcacatgtcgggaaaccaacgtcacaaacatacaacactcaatatctaggatttgcacgtggccttcttagcaatgccaaacccttgggcactgtgcaactgggacaactgtactcagcagccctagagctcatctaagggcaggatttttttttttttttggtggggtagaggggagggaatggagtattgttctgttgcccaggctggagtgcagttgtgtgatcacgactcactacaacctctgcctccagggttcaaacaattctcccgcctcagtctcctgagtagctgggactacaggcatgcaccactgcacccagctaatttttgtatttttagcagagatggggtttcgccatgttggccaggctggtctcaaactcctgaccttaagtgatctgccagcctcggtctccccaaatgctgggattatagtcatgtccccacagctataggtgtcttttcaacacagccttcagaatctttccaagaatccatttcagtgtccccaaagcacctccacctctcctcactggttttagtcttcacaaaacagcttttgcaggctggaatccagtctctccccaacttaaaacagctcctggagctccccaactgtcttagaataaaagtaaaactcctcaggactgcgtacgaggccctgcctggtctgatgcttctgcagatctccccaaccccaaggctcctcacgatcccccttgctggctcagctccagccgtgccacccttctcgttgtttcaacagttcttctctcctggccttcgcacgtgctgttccccaggcctggagctcttttctctctagtaagtggttccctctcattcttcacctcggaaagcctccccatctgatgttctatcctccagaaacccagctactcagctcaccccgttttcatttctccctagcacagcaaaatcttgtccttcccaatccagcagaaaaaggcgtgccatacacacatgtggaaaagcagatcccagagcaagtgtagtccacgctgaactttcccctaaggtcctatgtgcaccaggtaactccagccaggtcactgtaactttgctcattggagaaagagcttccagctggcaagagggccatctgaggtatcctgtggcttgggtgtttgaatcaatgaataggctcttggagactaagctctcactgtgtcactgtgtttgtgtttctctctctctcattctctttctctcattctctttctcccccctagagtttctggtctccttctgttctttcctatttggaaaattctggaaaaggaagaagggatggagaaacctgggaccaggggatcccaaattctcttttgtggtgggaggccctcatggcatcccccatggagatcccaggagaaagggctgagggcaaaggtcctgcttggcagccggagaaggaaaggcgaagtaggggtcttggcctggaattcccaccccttggaggaggccgagggggaattagcagcaatagggagctgtgtcaggtcatcccgatctcagcccacccttccatggggcacacaggcctaagggaggggcacagagggtatggcacctggaaccttggccaagtctcaagcagctctttaagcctcagttttgccatctgtcaaatgggtgtgttgaactctatgatatgaggactgggtttgttgggggagagggagaggcaaactcccaaagggaagtaggggcagcgtggggaaccagagccgtcccctcggcccccagggtttgggcgcccaagggcgcatgtgcttttgaaatcccatcctcccccctccccccatttattttttgcacaaatatctaaagggactccggtattccggggccctccaaccagcatcctggtccctccagtccccaggccacctagaggggcgctccagagagccctaccccttgcccagggccccccctcgagggagctgagatttccatacttggcaattggtctggggtcccaggggtctgggtcccatcttatggcttttccaggggacatgaggtggtgcctcccggtaccagagccccgggatgtggcctcctccatagggacgaggtttcccccatcccagctcaaaatgccccctaggtgctgggggcgtggcctcaagttggggatgtggctccttccttcgtcgcgcccttgggcgtggcctcccgagagggcggggcatcctccattcctaattccccaaaagggaaagctgagtcaagggcgtaggcgcagcccacccttggcgtggagccccccgagccccgcccctggggaggtcccaccaaggcgcaagccccgtccctccccgcccagcgccctccgcgcaggcgcagtgccgctcggccgaccgcccgcgctaaggcgcaggcgcggcaccgccctcctcggcggagcgcgtgtccgacttgagcttcacgaactccttggccacctcgtcgttgctgcgctgcgagaggattcgcagcaccgtgaggcccgtgtcgtccatgtggatgcggcggccgagcggcagccagcaggcggcgctcccgcgctgggccagctcacgcagctgcagcacggccagccccaccgtgcggtcctcgcgcgcgaagcagtagtccttgacgcacacctgcagctcatagcactcgggacccgcgtcggcgctcagcgtgctgcgtggggaggggcggaacgtgagacaggccacacctactgtgatgccccgcccacggccccgtccccaccgcatttgcgggccacgcccacaccggggtgcccacacctgtcacctcccacgctacgctagccccgcccctgccccgttacttgacctacaaccctgtgcttggccgcgcccacagcagctgaccccgagctgggccacgcccacgcctgttcttcccatttttccacccaccgaaaaatgaccgcatagttttacatccagctcccgcccctcagacaccgccctgcaaggccatgctcccaccctgagatacccgcgcctgtgccctctgccggctgaactgctgcccgcacggccctgcccctaatgtcccacccagaagctctttaaccaggctctcctctagacccacgacgtggccctttccccagccccccacacccccagcccacccctcttacttccaagatgccctccagacatgagcctgccctggtgcctcaccatgggtgacaccgcctcccgcatgcccctcacctgtgctcctgcccctaagcagtcccagtgacctgccctgacgccagctggataagagcccctcctacagggtcacgcccagcttctccctcttgtccacctcccaggttgtacctctatccctgaagtactccggcccaccctggctgacatctgacctcccactagaccatgcttctcctcctgagtatcccctaaaggggccaatcgccccaaaaccttctgaccaagagccctgtgctgacacgacatggaactggcttcaatcttgtcccataagagctcccaggccccctagataataccagctaaccagctctgatttacccttacccctgtgcatttttatttatttttatttatttttattttttgagtgggcatctccctctgtcacccaggctggagtgcagtggcacaatcgcggctcactgcaacctctgtctcccgggttcaaacgattcttctgcctcagcctccctagtagctgggattacaggcatgcaccaccacaccgggctgattttttgtgtttttagtacagatgggggtggcgggggggggggtctcaccatgttggccacgctggtctcgaactcctaacctcaggtgatccactgccttggcctcccaaagtgttggaattacaagcgtcagccaccgcgcctggcccatagttttttgtttttttaaagacagggtctcgctatgtcggtcacccaggctggagtgcagtggcacaatcatagctcattgcagccttaaactcctgagctcaagcgatcttcctgccccagcctcccaggtagctgggactactttcttctgcacttctgtctcctaagaacatccaacaacattgccctgccccagtgctctgtgaggctgacactcgacccaaggatctaccccggatgaccccaactctacccttgctaaccaccaccatccatctacccccgtgaacagactttttttttttttttttttttgaggcagagtcttgctctgtcgcccaggctggagtgccgtggtacaatcatggctcactgcaacctgtgcctcctgggttcaagcgattctcgtacccctcaccctctggagtagctgggattacaagcgcctgccaccacacccggctaatttctgtattttttatttttttgagtctcactctgtagcccaggctggactgcagtagcgccatcttgggtcattgcagcctccacctcctgggttcaagcgattctcctgtctcagcctcccgcgtagctgggattacaggcgcccaccacaacacacagctaatattttttgtatatactatattatatacaatatataatatatgaaatatataatatatatacttttatatataatataatatatactatatataattttatttatactatataatatatactatatataattttatatataatataaatatatattatatatgtatataaatatatatatatttatatataatatataaaaatatatttatatgatatatatttattatatattatataatataatataaatacatattttatatataattatataatataaatacatattttatatataattatataatatatatttcttttagacggagtcttgctctgttgcccaggctggagtgcagtggtgcgatctcggctcactgcaagctctgcctcccgggttcacgccattctcctgcctcagcctcccgagtagctgggactacaggcgcccgccaccacgcctggctaggttttgtatttttagtagagacggggtttcaccgtgttagccaggatggtctcgatctcctgacctcgtgatctgcccgccttggcctcccaaagtgctgggattacaggtgtgagccaccacacccagccatattttatatttttaatagagatggagtttcaccatgttggccaggctggtctcgaactcctggcctcaagttatctgcccaccttggcctcccaaagtgttgagcttacaggcgtgagccaccatgctcggccagagcagactttttttttttttttgaggtggagtttcgcttttgttgcccaggctggagtgcaatggctcgatcttggctcactgcaccctccgcctcccggactcaagcgattcttctgcctcagcatcccgagtagctgggatcacaggcgtgcgccaccacacccggctaatttttttttttttttttgtatttttagtagagacggggtttcaccatgttggccaggctggtcttgaactcctgacctcaggtgatctgtctgcctcggcgtcccagagtgctgggatgacaggtgtgagccaccacactcggccagagcagacttttttatgctgtccacatcatcagcatcctctagaccctatcctgatacccgcagcctaggcccactcccaactccaagaacctccatccaatgtgaccccacctccaccccacgtgacacccacccccaagcctgggatccatctacactccactcctgtccccagagccgactcctccagatgggctgccccaacggtcctgacaaggctcaatgtagactccagtagtccccacccccatgcaacctcagtcctgtccccaggtccctcagccccccgctcataagcgtcatcactgccaccctcattccttcaccagacagagtctccagccccagcaatggccctgcccaccatgcacttcctgcccagactttccctcccctctgcaagtcttcatcatgaagttaccccactctactcattgcctccccttggatctgccagcccccaaaggtgacctccatcctcgtgtcccctccctgatgtcattcctgcactactaaggggtctccctttccagcacccccacctagaatgtggcccctcccattcccgggcccagattccagatacctcctgcctagctggctttggggttcacctggcggatgccccctcccttgcccccatgctcttcaaagcatcccaaactcacaactggaagctctcattgtacttgggagcccagctattgttcttggatttggtcgcaaacttgcgtttcttgtcgctgagctggggcccaatgatgttgacctcgatgaacggccggaagatgccagaagtctgccacttgaggtcattggcagccaccactgttggaggaagtagagggtaagacaggtcaggttctcccagttggaaaaagtagatgtttgtggctctcaaaacctgcccaaggctgggcgcagtggctcacgcttgtaatcccaccacttcgggaggccaaggcgggtggatcacttgagtccaggagtttgagaccagcctgggcaacatggtgaaaccctgtctctacgaaaaatacaaaaatcagctgggcgtggtggcacgcgcctgtagtcccacatacttgtggggctaaagcaggaggattgcttgagcctgggtggcggcagttgcagtgagctgagattgtgccactgcactccagcctgtgtgacaaagcaagatcctgtctaaaaaaaataaaaaataaaaacaccccacccctcgcccgccgccaaaaaccctgtctgaaataaagactacatttcccagcattgccatgaagctaagtgtggtcatatgactatgttttggccaatgaggtgagagaaaaaaatcacgtgtactacttctccactgtggcttaaaaggcagggagtgaaccccaaactttctccttcctctagccgcagtctgcaatgcttgtgggggctgagctctttgtgaccctatagtggaggaaaaacacatttgggtccaggtatggtggctcacgtctggaatcccagcactttgggaggcccaggtgggaggactgcttgaggccaggagtttgagaccagcctggataccatagtgagacaccatctctacaaaaatataatttaaaaagtagccaggtgtgatgctgcatgcctgcaatcccagcgactccggaagctgaggcaggaggatcgctagagcccaggagtttgaggctgcagtgtgctgtgattgcaccacagcgctccaacctgggcaacagagtgagactctggcctctaaaacaaacaaacaacaacaacaacacattagggatgaaaatgcaacaaaagatggcagcagcacagatcaccaacactgcgaagcctccatatcagctcgaggctggttgctacttaaactgttatcccagagaaaaaccaattctatcatttttgtttgtttgtttacatggagtctcactctgtcacccaggctggagtgcagtggcgcaatctcagctcactgcaaactccacctcccgggttcaagcgatcctcccacctcagcctcctgagtagctgggattacaagcacacgccaccacacccagctactttttgaatttttagtagaaacagggtttcaccatgttggccaggctggtctgaactcctggcctgatccgccagctttggcctcccaaagtgctgggattacaggcatgagccaccgtgcctggcctaattctgtcttatttaagccatgtcaaaaacagcccaatctgtgttctagtcaacaaaagccaagaaaaggaaagcagggctgagagatggagaaagtgggattcagtcttacaaaactgtttacactgctggatccagccatgcctgaaggtggccacctttggacgtttccgtttcatggaccattaaacaacaacaacaaaaaaagggtgttgcttaagccagtttgagtttggtttctgttttagaacctagcaagtccctcccacctcagaccactcacctttcactgtgaccttgtgttccccagttcctggatgagtgaacagctcaacatggacagagacttcacccacagggtcttctacacccaagcctgggcagggcaggggaggatggtcagcgtgagctctgttctttcccacccaccaggagggaccttgacggcctcccacccacctgtgctggcggcaccaggtcatcagccctgatagggaggcactgatggggggccaggatgggaggtgctcttgggaagccaagaatcctgggttctggccttttactgccttgctgtgtgatcttgggtagattgcttaacctctctgagcctaatgcaattcttttcttttttcttattccattgattgccatgttgtcaaaattcagtcttcatgttacattacatcttggcagcatctggcaccctggcctcctgtggctgtttgtcctcttggctgcaacaatgtcaccaactcgattctcatcctacatagttgtcactccctccaacccccttttgtcattttctcctccgtgggtcctcaaactgaccctgcacctcaatatttgacactcttctttgtcttcacttcctccctaggtgcccataaactggaaaatcctgccagctctaccttcaaaatacatccagaagcagagccatgtcttttccctgtatcctacacctgcccccagcatcccatgcctggactattgcagtagcctccttgctggtcttccttccactctttcatctactctcagtataccagccagaaaaatcctattaagtcagatcatgtcggcagggcgcggtggctcacagctgtaatcccagcattttgggagggtgaggcaaactcacttgagctcaggagtttgagactagcctgggcaacatggcaaaaccccatctctacaataaatacaaaaattagtggccatggtggggcgtgcttgtagccccagctactctggtggctgaggtgggaggaacacttgagctcagaagggtccaggctgcagtgagacgagatcgcaccactgcacttcaacctgggtgacagagcaagaccctgtctcagaaaattaaaaaataaataaataacatttaaaagtcagatcatgtccctcctctgctcaaaactcttccatgggtcgggcagtggtggctcatgcctgtaaccccagtactttgggaggctcatgcttgtaatcctagcattttgggaggctgaggtgggcagataacttgaggtcaagagttcaagcccatcctggccaacatggcgaaaccctgtctctactaaaaatacaaaaattagccgggtgtggtagtgcacgcctgtaatcccagctacttgggaagctgagacaggagaatcacttgaacctgggaggcagaggttgcagtgagctgagattgcaccactgcactccagcctgggtgacagagagagaccctgtctcaaaaaaaaaagagagagaaaagaaaattagccaggtgtggtgatgcatgcacctgtagtcccagctatctaggaggctgaggcaggaggatcgcttaatcccagctggttgaggctgcagtgagctatgatcccgccactgcacttcagtctgggtgacagagcaagactgtctcaaaaaacaaaacaaagcaaaaccaaactcttccatggctcccacctcactctgagataatcaaagtggtttttgtgacctgcaacaccccttccaatagtggccctttccaataggttactattacctctccccactcaccccattcttgcccttgttaactctgacccagccccacaggtcacctcattgcatcacctggcccagaatcctcatccctcctgatgtgacagctcatagcggcatcttttattttccttacccctatttcccttctagtgcagaatcttaagtttcttttttttttttttttttttttcttttttttgagatggagtcttgctttgtcgcccaggctggagtgcaatggcgaaatctcggctcactgcaacctcggcctcccaggttcaagcgattctcctgcctcagcctcctgagtagctgggactacaggtgcacaccaccacacccagctaatttttgtagttttgagacggggtttcaccatgttggccaggatggtctcgatctcttgacctggtgatctgcccgcctcggcctcccaaagtgctgggattacaggcatgagccaccgcacctggccttcttttttgtttttgagatagagtcttgctgtgtcaccaggctggagtgtaatggcaccatctcggctcactgcaacctccgcctcccaggttaaagcgattctcctgcctcagcctcctgagtagctgggattacaggcatccaccaacacgcctggctaatttttgttatttttagtagagatggggtttcaccatgttggccaggctggtctcaaactcctgacttcaagtgatccgcccaacttggcctcccaaagtgctgggattacaggcatgcaccaccgcgccaggcctcaacccctaatttttccattatggagtcaaaaagttcccttgtctgcttgaatcatggtgtggtgggcttctgtttggggccaccagccgtgtcctccatggtgccaatggggatcactgatggggcagcttaaaagaatctctcccggtcccgccttctgtgactcaaaagggcatcctgtggggcctgtggacctgtgaccgccagcacctccaccaacccctccccaccccccaccaggcaactccccactcctggaccaccccatgcacggggagaagaaggggaaagtcagaggtgagggtgggaggttgggtcagtcaaacgctgattgggttacctcacgctggacaggaagtgactgagggttggggagcacaggggcctggagacccccatcaccccagtactggggtatgtggccccggtctttgctgcacgccccaggccgtcttccttgttgcctcaggctcccattccacccccaccccccgccaccagtcacatgctcagccgccccgccctcccccaggccgatgcttcatagcaagctcaatccgggccagactggggtgccgggggtgccagggggaattggacagtggtgggtcaggtgaggggtcagaccaaggccaaagctagtaagaaggggggagggaggcagtgctgggtgcccccatcccgtgctttgctggcttcgcggggaagggtctttcctgggcctctcagtgcttcttccaaccccactccccactccccaagtcccgggacccctgcaggggaaggttcctcggacaagtggttgaatctcctttggctctcagtatctcatctgtggaatgatgtacccctcgtggggcagttaaagaaatctgtttcagtttccccaagaaggctaggcatggaggctcatgcctgtaatcccagcactttgggaggccaaggtgggaggatcatttgaggccaggagttcgagaccagcctgggcaacatagcccaggaggtggcggctgcagtgacctgagatttcgccattgcactccagcctgggtgacagcgtctgcctcaaattaaaaacaaaatggccaggcgctgggattacacctgtcatcctagcactttggaaggccgaggccaagatgggtggaccacttgaggccaagagttcaagaccagcctggccaacatggcaaaaccccgtctctactaaaaatacaaaaattagccaggcgtggtggtgcgggcctgtaatcccagctactcaggaggctgaggcacaagaatcgcttgaaaccaggaggcggacggaggttgcagtgagctgagatttccccactgcattccagcctgggtgacagagtgagactctgtctcaaacaacaacaacaaaaccaaacacagattcttcaagaaatgcctggcacaaggtcctgctcagccttagagcctgataagtattcactgagatcagcctgggcaacaaagtgaggccacctctctacaaaaaaaattaaaaattagctagccatgtgacgtgtgcctgtagtcccagctcctcgggaggctggggcaggaggatcacttgagcacaggagggaggctgcagtgagcagtgattgcaccactgcattccagcctaggtgacagaaggagaccttgtctctaaataataatatcaataacaataatcctatgaagtagggtccttgactgtccccattttacagatgagaaaactgaggctcagggagacagattcttgcccaaggtgcctacccgtggagtggctgggctggaatcagagcccagctcttaacctgacaggtgcctgtcccggggtcccaggatctggcttaaaaaatatgtcatatcaggagaaatggattctgggattcccactggaatcgcttcttccccatgtagaaccagcaaatcgtccttccccctcacccgcctgggccctccaagccgctcaggcctgggcggcggccctgcaggcccttgaggcagaaggacgatccttttactagccggggccaggaggggcgcaggcaccgggcaccaggcgcgggcggcgggcgggaggcggaggcacgtacccttctcaggataaatgtcttcactaagggtaaacctagtaccttttccaccatggactaattgggggtgggggtggaagggggagagaggtgggaagcatggggagcggggagagacgagccagtgagaggtgaggatggaggagtgtgtgtggagggggcaggggaggcgcggagaggggacggcgagtgagagggaggaaaaacaagagagagagaaacgtcagctgcagacagacggagagacagacagcctcctgctccagggacaccagggacactaaaagcagccaggactggaagggaagctgagctcagagacccagcgcccacggagggcccttgggctggctggatcgggggagaagggggccgttggaggccacagggctttgctcccctcgccccaggctgggtgtcgatggcgattctccctccccctcctgagttcaagccgccaaacttcttccccttgtcgggaccaattttgaaaagggggggtccccagggaatcctgccctccatccagccccagctgccgtgtgtgtgcgctcagagagggacaggagaccgaagcaaaatacagagagaaagagagagtttgagaaatgggaactccctctccgtccaccctcccccaccaagtcgaggtccctcccgccctcggagctgtcaatcattccttagccccatgacatcacagaggtccctcctcaggggagttcaaccactctctgggaccatgacgtcaaagttcccacccatggacctgccaatcattccttgaccccttgacatcagaggtcctgcccatcctgagctgtcaatcactcctgaagtctcccagagctgtcaacgattccctggacccatgactgtccaggtccctcaggagctgacaatcattcattggccctgggacaccattgattttcccaggagatgacaatcaccttgtggccctacgacgtcacaggttccacacctaagagtcatcaatcctaccctggtccttgatgtcaaagacattccatcccagagctgttaatcattgtctggccccaggacatcacagattttcccaggggttgacgatcacctccaggcctgtgacgtcagaggccccgcccccatgaacctttgatcgctcattggtccctggacttggtgcagagatgtcaattccgccccatccatgacgtcacaggggagtgagccaatggcagccgttcaggcttggggcggggctgtctccgcggagcgggaaagggtgatgcggtctgggtacccttaccctgggccgattgcgtctgtacaaaggtcttgattagcaggtcggtggcctgcgtgtagagcgacagggcatagcgcaaggattgcaggtccgggctcttctccaggaaggtcttcttgaggcccacgccacccgcgtggaaatattgctggggaggacagggtggggagaggtgaggatggtgggaacctctacccactcatagggctgggtagccctgctgtccccactcccaattcttcccgctactactttctcacctcttcctttgctttgcctagtgaactcctatgcattcctcagaacccacctctcacatgccgtcttccaggaaggcctggcttctcccaccttgggctcgcccagcccccatccttccctctacccttctacacctcaagaaatgcctggcacgaggtcctttacatccttccctctacaccttctcactctttgggctcccccagcccacatccttccctctaccccaagcctaatcctacaaggctgagaatgtctgtatccagcagtcttccccgacctggggctccttaaggctccagcattagccagcccagctctggcacagacaggggaacgagggagtgtccataaattgaacaaattaatgtgggtccgaggcgagcctaagtccatgaccacagcagccacaccctctacatcccccacctgggatggggaggggtagggcctctcaccttgatggtgtccagggccaactcaacaaccgcgcactgctttggggtcaagctcttggcttcttctcgtaccatgtgatcctggatggatggggagaggggccatgtgggtggagtgggctccacctttggaatctgtgtctatgggtctcatccctgttcaacttggaggagctgggctgagggtctatgttttcatcatcccagcacccaatatgtgactggtacacagcaggtgctcaaaaaatattggttgaataaatgacttgccctcttgatcaagctgtacctgaagctgaaccattcacatctttctgacacactggggagcaaatatcttgtgcttcagtgagtagagtttctgtcctttgagcctgtaatgcatgtcatcatcctgggacccctcccccaggatggtggcaacctggaagccacatgagtttggggggcagtccctcacgccataatctatccccactcctcaccttgagtttggacagctgacccagctccttggctgcattgaagatcatctgggttccctgcaggtaacaacatacagctgggtgagggcaggggtgctacagctgacactccagccccagagaccatcttggttcttgcccaaaggctctgggcagggcaataattgtgtcccagggacagaggtctggaattccccaggaagaactgaggaggatgtggtgaccttgtccctgaaaatcccggtcctgtgaggatagtcccccaccctctcagccccacccaggcttgtgtaacaggagaaacagacagggaccagactgtgaggggcagtgggttgggggagcctcagacggtggtgtttgtgggtgtgggcagggtttccagggaaagggagctttgggaacacaataggctaggctgaggttgcagaaaatggctctggtcaaacacttcctcctcctcaaggagcatcccctctgcagggaaatttcccctgtaatctgggaggaatttcagtctgatttttcttttctttttttttttttttgagacagagtctccctctgttgcccaggctggagtgcagtggcatgatcatagctcattgcagcctcaaactcctgggctcaagcaatcctcccgcctccccagtagctgggactacacgtgtgagccaccatatccagctagtttttgaaatttttttcatagagatggggtcttgttgtgttgtccaggctggtcttgaattcctgggctcaatcgatcctcctacctcagcctcccaaagtgctgggattacaggcgtgagccacattgccagccagtctgaccttttaaaggaaaaatcctccctctatacaaacacctccatatccgtcctccaccccacccccaaacagacactagcaagatggtgatgtggtgatggctctgacaagccagatgggcctgggttcaaattgcagtcctgctgtgtggccctgggcaaggcacttaacctctctgagcctcagttttcccatctagatgaggaaaattatatccactttgtggcttagtctggactgaacaagtctttgctcagtgttcgctaattatcacttggtctcaaagtcacgggcaatgctaagggagacggggtcccagcctggaaggcatgtgtctagcctcctctgtcactgctggatggccccaggcttgtccctgaatgctctgagcctcaattcccactgtggctaacagggatacccatggtaacttgggggacagggtggggctgagtattgaggtaacaagtcttgtcttactgggtcctggggtggtctgggggtcctgggtgaggctaggtggggagggggcccatttactgtggaaatatttggaattatgttcatagtctaccagctggccatctggtcattcctagaggtattactattatcatcttggctgttactattcttatttcttgtctgtgatcctgaggttcttacaaggcacagttactcaggggtccagcggactgggcctcagtttcccctgctgcacccacctgtagtctggcagggctcaggggccttcctgggtaccctctgccctacccaccaaccccccacccaccaccccccacgagcaagccagacagacaaaggaagaagagaccaacagacaggttcacagtacgccctcggacggcacgaaccacagaggtggaagggggcacaggggtggggtgggggggagtgggatgggagccagacagacagtgagaggccggtcttacgtctgagtggcttggcaatttcaccctgccctgtggagagaatcaggtggaggtcagagttctggtgactgttgggaggatactcagtgggacttccctgccccctcaaagcacagtctcacttcccagcccaggagctcctccccaggtcctgggtctaatggtgggccccctccccagctagcacctcctctggtcccctagcaggggtttagaggtcagactccttgactgccagcacactctcggggtacccaggaggctggaagcagcctcatcccacagtcagcctgccccaggatggggcacctggggaggtggggagatgagacagggctaggaatctgtctcctcctccattccctaaggggctgcccctatatcccagcacccaagtctacaaaaaacatattaacatatactgtaagttcactcagtgctgaagaacccatacactaaactacatacgtgcactcctaaacacttgcaggcacgtacacaattatatcacacacaaaaacccacacacccttcttgaccccacacggattcacatccacatatagggtgcctgggacactgaatgtgccccgcaaagggctggcagagagagtacggaacccctgtgacccacattcacaaagctaagactccatttgtagacacaaatgtacaacgatatcttctgcacaagtgtacagcaagacagctgcttgcgtgttgctgtagctcccatctccttaacaacaaacacccattagcacagcaacaaaaagaaatctacgtaaaaaacaacacgtctcagtccagggtggtgatctagcgtgtaggctcctcaagaaggcacagaatttcagctgagcccagggctcagatgagccctgtgggtattgctgtgggaggatgggagctgtttgtgcacacacattagttcacatgtggacacacacactgcacgttctgtccctggagaatcacttcatctctgacttctggttttgcaggacttggttaggagagctatctcctacccacgacccccagctgcccttcctgcccaggtgcacagacgcacacacatgcacacacatgcccagacactggagctcagggcctcagtgagacgaggccctcattaccttttctaatcccttgccatgttttctcaagaggttcccctgcagagataatgtcacagggtgatcaacctggcaagtcgtgcagggtgggaagctgggatgctcacaggaatattcatggggatgggggaatccacactgcacagggtactggtgactgggttgcatggggatagtgtgtttgtgtgtgtgtctgtgtgtgtgcacacacgtgcatgcgctttagtgactcactcttaaatggtgtgagaggcagagacaggaaagagagagaaagatacagatacagagctaaagaaagtcagaaagaagggaaaaaagccactgccaaaatataatccatttacatttactgtacacatgagactcttggttcttgggttaacaggaaagcaaatgggctgcatattcagacagatctgaatttgaatcctgattctggcatatatttactatatgaccttgaacaagtgactcctctctgagcctcagctttcctcatctgcaaaatggggataataatatccacctcactcaaagggttatcatgaaggtgagctgaaacaggagctatgagaaggcctggcatatggggagtcattaaatgcgaattcctttattccccctgcctacaaatgcattgcctgtggttgggtatgctgccaccaagtggttatagccaaagacccaggctgcagctaccaggaagtaagagcccttgtaaacttttaacaaagtgaaatcttgtaacagccttgtcttgcccacaaagggaaaatctgaagttgttttgtctctgctcttacacatgtctgcatatcaccaccaccaccaccaccaccaccaccaccattagctctgcctctgggccggtcactgagagtgcagtggcgcgatctcggctcactgcaacctctgcttcctgggttcaggcaatactgagatgagtattttaatgcatcatgccatttggttcttagaactaccctcagggaggtgatgcaatgagccccattttccagacaaggaaacagaggctgggaggtcaagtgacttcccaaggtcacagagagagacagtggctgggctaggatttgaccccaagtctacctgacatcaaagccatgacaaaagtctcccacttgggcacctgggtgtatgtctgggattggtgtgtgtcggtgtggatggcgggagttgggtagacagggtggtggggtaccaaggaatggtctggagcatggaatttcagaggaatcagaagtagagaccctcatggtgaggacctgcattctgggaagctgctgacagttcagagcccaaagaggaggtcagaggaatcctggggttgatcctctttctagcttcagggcgtctggtgacatctgggcacgggagcaaggttggattctacccttagacggcaggtccgctgcgaaggaggagctgggcttggggtttgggagtgggtagtggggctcctctggacttcagtgggacagggagggtgggcgtggtctccctccctcccagccccgccccctccccatgccccgccccagacagacacaggcacatctaggcgggagggaggatggtgggtgaggagggggcgctgggtgggtggggagaggggtgcagcgacgcggtgggccgagtccagacacagagaggacggacagacagacggacagacgggactctacttacgatcatctgtcatccgtgatgggggcggggcggtgggggaggggggaataaggtaccatgagtctcccgggaaggccagggagggggcagagatggcagcacggaggggcaagacccctgccccagcccagcccagaagaggtggaaggatgggaagtccgagcctccccgaccatcgtcgcccatctatggcccccgctcaccctccccaagcctccgtggtccacctgggaaagacctccccactccctaatgtgcccacagcccacatgccattgctgtcctcaggttcttgatgcctcccggagggacccacgcccagctacatccctctacagatgtttgggtccccttggtccctagagattatggcctctggtctatcggtcctggtctctggatggccaatgatctctgcttgacctctctgaccttggatgccctccatgacctctggctgacttccaggagccccttggtctattgatctctgatgtctgaagtccatggtgtctcccctctttggcttttgaatgagccccaaagcccttagaaaaacccattgatgtctatgccttctcttttttttttttgtttttttgagaaagggtctcgttctgttgcccaggctggagtgtgcagtggcgccatctcagctcactgcagcctctacctcttaggttcaaacagttttcgtgcctcagtttcccaagaagccaggatcacaggatcacacccagctaatttttgtatttttagtagagacgagatttcaccatgttgcccaggctggtctcgaactcctgacctcaagcaatctgcccgcctcgagcctcccaaagtgctgggattgcaggcgtgagccacggtgcctggccaatgtctatgccttccgtggctcaaggataaccttgatcccaaaattgacctgttttctagatgacctctgacctttgaaagctattttgacctacatgtgacctctatgactttagtggtctcttgactctacctgatgtctttgaccccagagaaaatacaatggactctgaatgacctctttaactcttcgatgatctttaacccctgtgtgaactctctgacctctgaatggccccccactgacctctggtggcttccatgacccttgaatggcccttgagcctggatgacctctctgagaccggatgcctttgttcttaccccccagcctctaggcaccaagttttctgggctctcgccagggaggtggcctaaatgtcccctcgggccccctgcaggtctcaccgtctggtcagtgaggggcggcaggacgatggttttctccatggtgttcataaccagcttccacagctccttcagcactcgcttcagcacagtcttctcacagattttggcaaagagggtcaggctggggacgaggggcaggtctgagagagggcccagctcgcccccacccacagatcaccttcccttaacaggtgggcaaggcattccacagataggaaagagggcccacagcctgtacagggacccctgggtggtttgatggggctatgatatctgatgcatgaagagaagagtgagtggtggttggactagtcagcagggaccagatgggaaggggccccaatgtctgggaggaaggcttgggttttatcaggatgggggtagtggggagccatggagtgttcaagagggagacacagccagactttcatgtttgaaagaacagtgtgggggatgaaccgaaacaggaaggatggagatcagggactatgagggagaaggccatgcccaagaggaacaggaggggaatggtcagaggagggcagacttgaaagggaaaacagcaaagagattgtggttggatggataggggttgaaggagacaggcagtccaccaagatccatccaccaactgatccagtcacccaccaatccatccctcccccagtggtccttaattctctatttctttttctatccatccatccatccatctgttcatccatccatccttccatgcatccttctacccatccatccacttatccatttatctatccatccacctgtccattcatccatctgtccatccatctatgcatcaaaacatttattcatccatccaaatatttctcacctattaatccatccatccatcgacccactcatccacccacccccccatctgtccaaccatttatgcatcaaaacatttatttatccatccaaatatttatccacctatatctatccagcatccatccatctacccacccacccatccaaccatccattcatccatccacccatctgtccatccatttatgcattaaaacatttattcaatgatctaaatatctattgacctatccatccatccattcatccatccatccatccagccagccagacagacatctatgcatcaatccatctatacatcaaaacatttattcattcatccaaatatttatccacctatctatccatccatctacccacccatccatttattcatccatccacccatctgtccatccatttatgcatcaaaacatttattcatccatccaaatatttatccacatatccaaccatttatccatccatccatccatccatccatccatccatccatccatcgtccatccaaccatccatcaagccagcctgccagacatccatccatctaagcatcaatccatctatgcatcaaaacatttattaatccatccaaatatttacccaactatccacccatccatctttttaaaacatctatcctccctctatccttctaaacatttatcttttaatccatgcgtccacccacctacccatccctcatgtcacctattcatccaccattcattcatccacacaaatatttactcaccaatccttccaattatttacccacccaactttccatccccttcatgccaccatctactcagccatccaactatccagtgaccacccagcaaacattccctgcacaccctctccagccagtccctgggtctctatggccctgccccagcccctccccggccagcccagtccacctggcccagctcacttgctgtccagcaggtccatgatgggctgcaacacattgtccgcgtcctgggccacgctgctgcaggcactggctggcacattgcctgtgcccttaacctggctaaggatgtcacccatctgtttgacacactcttcaatgtgcggctggaagctggggacacagaagggaagggctcagaccacaggaagggctggatgaggacacagatgctgatctgtggtccttgaggtcatatcatttgcatcacagcacataaccgagcaagaatggagaacaggccagatgcggtggctcacgcctttaatccaagcactttgggaggccaaggcgggcggatcacgaggtcaagagatcgagaccaccctggccaacatggtgaaaccctgtctctactaaaaatacaaaaattagctgggtgtggtggcatgcacctgtagtcccagctacttgaacccaggaagtggagggtgcagtgagccgagatcgcgccactgcactccagcctggtgacagaacgagacttcgtctcaaaaaaaaaaaaagagtggaaaatagtaactgcagaaccaggcaaagggataagacatttgcccgcattgttcatttcattctcaaaatcctacccaggtactattattgtcatcaccccaaatttacagagcaataaaaaaaaaaataaggctcagagaagttaagtgactcacccaaggccacacagctagtaagcagtaaagccaagatttgaactcagccttgtctaactctgagcctgcaatcttcacctctacatctgctgagcctccagatgccccaggcttagagggctgaaggctgttccctccccactgcccccagccctggagatgctcccacctggtagcaaacacccggctgagctcatccaagacgttattgagtttcacctgaagctccttcaggatgtcactggcttcagcatccagctaaggagggagaagggacaccaggccaggttcagtaagtatccacatgtactgggcattttctcatctgacccagggaaagggatcccaaggggctgcaggggaaactgaggcacagaccgttatgctgcaagcctgggtttaaggccatggttgagctggaattcatccccaggcctggtggcatatgagctcaggggcctgcagggacacagtggtgggggtgccccatcccttctccagccctgcctcggccctgcctcacctcctttcctcccatggcttcgaacatcttctccagctgaactcgtagctgttgagtgttattcatgagaatgcagggctgtgggtgggaacagagaggggagtcaagcctcaggacctctccccagagcctcccctacccaccgccagggaccttgggatggtttcagggtctgggtctggaggaagctggggtcccatggggtcacctgcaaatggaagggagcttttgtgctcaggttcctgggcgtgttgttggggcgggcatctctggggactggtgggggcaaggaggactcaagtaatcccacgaccccaggcctggtggggggtccatgagaggggctgggaactctgggagtagcagagtttcctgcaagagcccaaagctttgcagctcacaccctgaaggcttcatttgcaacagccagacagtgacacactgaaggcgtgtgccctcaccccgagatatacacacgagaccccccccacagatacacacactcagacatgcacagccagacacagccatagacacacactcacaccacgcacattcaacaccgccataccaaacctggtgagacacacccacccagacgtgcacaaacacacacacacactcacactatatgcagttaactcagccagacaaaacacggtcacacacacccagacatgcacagctggacacacacacaagcatacacacactcacactataaccagttaacacagctagataaaatatgagacacacacctagatgtgttgtatagttgaacacacatactcacacatacatacactcacactatacccggttaacacagatgaaacatggctagatacccacactcagatatgtacagacacacacagatacacacattcatgttatacccagttaacacagccagacgaaacacaatcacacagatacacacactcatgttatacccagttaacacaaccagacgaaacacaatcacacacgcacactcagacgtgcacagttggactcacacacacattcatgccataccctgttaacaaagccagacaaaacatgatcagacacgcacactcagatgtgcacagactcacacacacacacacacgcagagtataccagtcaacacagacaatacacagtcagacacatgcacttacttcccatacactcagacacacacaactagatacactctgatcacacacattcaaacaagcacctctaaacacacagacaatccagtcagatcacacacaggtggacatacatagccccaggtgtcagggccctggggagaagggagtcctggggatgctgaatggggctgaggagggagataggtcaggggccccctcaggtcaccactttctccttctccttggagcagtaggaggcaaagtccttggagatgatgtctgcatactggaggagcacattactgatggtctggggaagacacagagtgtgggtgagaggagaggctggcaccaaggcaggcgccagtcgtcccatcaaggccactagtgagatcagtgatgaacccaaaccctattaggacctaagatgggcctttgggctaggcaaattctccactcaagatgaccatcaagacctagaggagataccgctcgatgaagatgatcattttatgtagacccagctctttttcagagcaaccaagcatcatattaacccagcctcaaccacaagatgacctgatctcaaatcaaaagccaattcctacttgtaattcccaaggtcaacacagcctaatgccaatgaatcaaacctcaaccccaatgatcccaaccctcaaactcaccccaagactcactcaaattgtgcatcaatctcagcactcactccaatctcaattccaaatcaagacccagcacagcctcaaactccaaccaaacagcattgccaactcgcactaatgacctcaattccaaccctgatctcaacccacacctcaactccaaccttaccctacacctcaactccaaccccaatctcaactccaatctcaatttaaaccctaaccccaactccaacctccattcaaacctcaactccaacctcatctcaacctcaacctcaacccaaacttcaactccaacctcaacccaaactccaacttcaatcccaacctcaatgacatcaccaactccaacctcaacctcaaccttagcccatctccaactcagacttcaattccctaaccctgaccctgtcccctagccccaaccctacccactctcccacaccttggcaaagcgcctcatgtagtgccccacgatctgagggtcgggacactcgagtttcttgatgatttcaaagctctggttgagttgggagaaaacatccaccacggagcaggagaatagggcatgctctgaggtctgctggaactgcagggggaaggaggccaagaggaaggaggagatcagcaccagagaatccctagagcccaactctcccactctccacggggagagccagagaccaatttccccggggtgagatggacagagggcgaggtagacttagagtcaactctagaggtggacgcagaagccatggggtgcctggaggtgtccggcttgatggaactcacattttgtagttgatgaatgaacaaaagattttaaaaaccatgagcaagacaaagatggcggacacctaccagagactggcctcatctcaagggcaaatttccacctaaattgaccccagtgggaagattaggaacttggttgtgggtgggccttcttaccccatccttcttgtctcgctccagggcaccgtgcaggaaatcccgggacacctcctcattctcatccagccactggatgacgaagggttcaaaccatctggaatgaagagccggggtggggctctgccacctcttgtcctcctcaacctctgcgccgcctggttctgacccactaacgagtggagctatggctgctcctgctctgcctggagctctccctgcagccttgagtggctgctcctctgctcgcctcctgcactgaacctcagttactttgctcatgaaatagattgagtggccccttttacaacagggcccaggcctgtgggaatcctagttcagataagctgcccatggcaagtgggtttattctctgagtcctctctgagtcctccgtccatccttccctccctccctccctccttccttccttccttccttccttccttcttcagataaactgcccatggcaagtgggtttattctctgagctcttgttttctccctccctccctccctccctcctttccttccttccctccctccctcccttccttccttccttccttcttccttccttccttccttcctgggtcttgttctgttgcccaggctaaagtgcagtggtgcgatcacagctcactgcagccttgacctgctgggttcaagcaatcctcccacctcagcttcccgaatagctggcactacaggcacatgccaccatgcccggctaatttttttttttgtcttctttgtagagacaggatttccctgtgttgcccaggcaggccttgaactcctggcctcaagtgatcctcccaccttggcctcccaaaatgttgggattacaggaatgagccaccgcatccagccagagctttcgtttcttgtacaacagaagactagccatcctcctgtgctgctgggagcagagaacgacaccacaattctcaggaaccggcggcaccgtactatcctccaacacacagcccaggaatcagatgtcccgagttcaaatctcgggtctgtcatgtactgggagtcaccgtgggcaaggaatgtggcatttattcactcattcattttatttttatatttatttattttttgaaatggagtctcactctgtcgcccaggctggagtgcagtgacacgatttccgcttactgcaacctctgcctcctgagttcaagcgatcctcctgcttcggcctcccgagtagctgggactacaggtgtgtgccatcacacccggataatttttttctttgtttttgagacggagtctcactttgttgccccagctggaatccagtggtgcaatctcggctcactgcaacctccgcctcctgggttcaagcaattctcatgcctcagcctcccaagtagctgggattacaggcatctgccaccacacctggctaatttttgtatttttagtagagacagggtctcaccatgttggccaggccggtctcaaactcctgacctctggtgatccacccaccttggcctcccaaagtgctgagattacaggcatgagccactgcgcccggccaatttttgtatttttgtagagctggggtttcgccctattggctatgctggtctcgaactcctgacctcaggtgatctgcccacttcggcctcccaaagtcctgggattacaggcacaagccactgtgcctgacccattcattaattttagagatgggatctgactatcttttccaggctggtctcgaactcctgggctcaagcaagtcctgcctcagtctcccagattgccggggctacaggcatgtgccaccatgcctggccatttggcatctttaactctccaatttctcctccgcaaaataggaattaaaatgatcccaccttaactcatagaattgtcaaaaggataaaatgagaaagtcacatggttcctgttgctgttgactgaattttctgggctgtaggagtcaactgctcaatggctgagagtggagaacactggattcaagccccacccatgcccctgatgcccaggtaaccctaagtaggtcagtcttcctctctggctttccttctagctgtcagtgctacagttctggcttgggttgggcctggggcaggggacttacgcagggtactcaggcacgcggtccttgaaggcgggaagttccgtcacatactcattgtagagccatttcaccttgaagtggaggttcatgtagtcggcactcttgcatagacgatgcttgtcgtgctctggccagggacaaagaggatggcacagctggaagggtctgccaccctctgtctcggcagagaggctgcctactctggccatcactgatttccaactcaggcatgagggtattatagggtgctcacagccttggaggggacacagaggtacagccacctggtgtggccaggctggggaacactggggtgggaaactcaccctccatggcgtacttcatgtcttgggcaaacagattccacatcacttcagcgctgattttacccacattcagctcctggggaaacctggcaaagtcatggaagtataaaactttggcaggcagaaggcagatgggatgggctgctttgtccttccctgccccacagaggagtgtagggtagggtagagggatttgggttcaggttccctcatagccactgctgactgactctgcactaaggctttgtttccctttgagcctccacccactcatccatttgtccctccattcattcattcatccactcatgcaactatccacccatacattcaacaactcatttatctattcctccatccattcatccatccttccatccattcattcacccactcatgcaactgtccacccatccatgtacccatctatctattcatccatccacccattatccacccatccaaccatcccttcatcaattcattcacccactcatgcaactatctatccctccacctacccatctatctattcatccatccacccatccatccatccctctatccattcattcacctacttatgcaactatccacccattcattcacctatccatctatctatttatccatccatccctccatccactcattcactcattcatccaactattcatccatccactcaaccacccatctatctgttcatccatctatccctctacccattcatccaactatccatccatccacctacccatctatctattcatctatccacccatccatccatccatccctctttccattcattcacctaattatgcaactatccacccatccgttcacctatccatctatctattcatctatccatccatccctccatccattcatttgctcattcatccaactattcatccatccactcaaccactcatctacctgttcatccatctatccctccacccattcatccaactgtccatccagccacctacccgtctatctgttcatccatccatccgtccatccttccatcatccacctatttatctgtccttccatccattcattcgcccactcatacaactatccacccacccattaaatgacccatctatctattcatccatccacctatccatccatccctctatccatttatttactcacttatgcagctatccacccatccatttacccatccatctgtccacccatccatccattcctttttttttatttagagacggagtctcactctgtcacccaggctggagtgcagtggtgcgatttcagctcactgcaacctccaccacccgggctcaaatgattctcgtgcctcagcctcccaagtagctgggattacaggcgcgagccactatgcccggctaattttttatatttttagtagagatggggttttgccatgttggccaggctggtctcaaactcctgacctcaggtgatcctcccgcctcggcctcccaaagtgctgggattacaagcgtgagctgccacacctggcccatccgttcctttatccacacagtcatccttctaccaatctatctgtccatctgttatttacttatttatttagagacggagtctcgctctgtcaccccaggctggagtgcagtggcgcaatctcgactcactgcaacctctgcctcctgggttcaagcaattttcctgcctcagtctcccactagctgggattacagacgtgtaccaccacgcccggttaatttttgttttgttttttctgttttttttgagacggagtctcactctgttgcccaggctggagtgcagtggccaatctcggctcactgcaagctccacctcctgggttcacgccattctcctgcctcagcctcccgagtagctgggactacaggcgcccaccaccactcccggctaatttttgtatttttagtagagacaaggtttcaccatgttagccaggatggtctccatctgacctcatgatccgcctgcctcggcctcccaaagtgctgggattacaggggtgagccaccgcgcgtggccaatttttgtatttttagtaaagatagggtttcaccatgttggccaggctggtctcaaactcctgacctcaaatgatccacccaccttggcctcccaaagtgctgggattacaggcgtgagccactgtgcctgaccccatctgtttattaatccatccattcatccacccacccttcaatccatccaaatccctgatcttaattccctaaccaggatatgttaacgccccaaagctagagtcctctctagcactcatctggcagagaaatagaacacagtagctcattcagctaacacagatgaaaattctacagacatataaatccacaaatgaaaactgtgcccatattcatacacaatacacaatattgtatattgtacaatattgtacgttgaattgcattcaatgattttacacatatacaaattaaacccaaaacccactgaccacaacaatatacaaaattacttacatccatacatataagatataatgcaatttaaatgtatgatatgtattagggtagcacatagtaatacttgagcaacactattattaattaacctacatacacataaaaaattatacacatatgtacacacagttatgcatgcaaatgaatacatacaaaatacatgtctgattataccagtgattgtgaacatacacacaattttatgtttatgtttgcaaattgtacccatatttgaattttgcacaggtataatcagacccacaattacccccaggtgcacatttgtgtaattagacaaaatcatcttgacacacaagacacaaagttgtatacatacacacgatgacacccagataattaactacacagatacacaactcactggttgaggcagggagtgtaggaattcttgtcttcctcaatgatggacactatgagggtaatcagcttggaccagaagtcgaggttcttgatgctgggcccctgttcctctgggagaacttcccccttcttggcctgaaatggacagtggagacctcggttatagggggtccagaggttggtgcctcggtcagtttattactgaagaacaagaggttttagaggaatgcatcccatcatcatgtgtatggttcaggtaagaaatctatatagagaggaattgaactcataaactggcccaaacagagctcatgtcaatgcagcttgataaagcttaagatttttagactccactctaaaagtgaatggaaataaatgaaaccaaatttagttgaacaaacccagctccactaaaccaaatggaaatgaaatgaatgcaaattaagcccacttagcttaacggaagtaagttcttcctctgagttaaatcaatggaactgaacttgggccaatcacactgaatggagtgcaattcaacctaactggattgaattaaactcaaatgaattccgttggattgaacctaatcaacttgtccaagatcaacatcaacccaaatcaaaataatggaaataaatcgactcgaactcaactctacccaagtcaacccaatccgattctacctatctaaacccaactgaacatacgcagggcaattcaacccacctttgttaatcaatggaaatgaatataatcagctgaaattagcccaattcaacccaattcaactgaaatcaattgcatctaatccaacaacccagttcatcctaactcaagacaatttaacccagttgagaacaacttgacttgaatgtaaatgaactaaatggaaatgaatgaatttgtactcaataaaactcaatgcaatcaaccaacttgttcttctctctattttttttttttttctttcaagagacagagtctcattctgtcacccaggctggagcgcagtggtgcaatcatggctcaccatagactcgaactcctgggctcaagtgatccttccacctcagcctccaaagtagccaggactacaggtgcgccaccacacctggctaatttttgtatattttgcaaagatagggtctcgctatgttgcccaaactggtctcgagctcctggcctcaagggatcctcctgcctcagcctcctaaagtgctgacattacaggtgtgagccactgagcccagcctggctcactaatttgtcaagaacaattttttttttttttttgagacggagtctcgctctgtcacccaggccggagtgcagtgatgcgatctcagctcactgcaagctctgcctcccaggttcacaccattctcctgcctcagcctcccaagtatctgggactacaggtgcccgccaccacgcccggctaatttttttgtatttttagtagagacggggtttcactgtgttagccaggatggtctcgatctcctgacctcatgatccacccacctcggcctctcaaagtgctgggattacaggcgtgagccactgtgcctggccgtcaagaacaattttaacttaagtcaaccaaatagaaataaatataactaaactgattatggttgaactaaacaatctaatttaatccagttcacctcaactcaattcaaatgagagtgagactgattccaactctagtcaactgaatgtaaaggaacagaatgaaatcaaattgaactgaacacagcttatgtgttatatcctatcagaacctgggtaggggctgcctccagctcccacagcctcctgagatcccactatctcaatactaaccatccctgtttgtaaatttccagtttgtacatctttccctcataataggctataagctccttatagcctaatttaatccagttcacctcaactcaattcaaatgagagtgagactgattccaactctagtcaactgaatgtaaaggaacagaatgaaatcaaattgaactgaacacagcttatgtgttatatcctatcagaacctgggtaggggctgcctccagctcccacagcctcctgagatcccactatctcaatactaaccatccctgtttgtaaatttccagtttgtacatctttccctcataataggctataagctccttacaggtggtggctcatgcctgtaatcccagcactttgggaggctgaggcaggaggatcgcttgagcccaggagatcagcctgggcaacatagtgagatgccatctccacaaaaatacaaaaactagcctgtcatggtggtgcgtgcctatagtcccagctacttgggaggctgaggtgggaggatcacttgagcctgggaggtcgaggctgcagtgagccatgattgcatcactgcactccagcctgggcaacagagcaagaccccatctcaaaataaataaataaattcaattcaactcaacatttactgaacagtgactgtatgccagacataaatttttatgccaggctgggagtggtggctcacgcctataatctcagtactttgggaggccgaggcaggtggatcacctgaggtcaaggagttcgagaccagcctggccaacatggtgaaaccccgtttttactaaaaatacaaaaaattaactaggtgtggtggtgggcacctgtaatcccagctactcgggagtctgaggcaggagaatcatttaaacctgggaggcagaggttgcagtgagctgagatcacaccactgcactccagcctgggaagcaagagtgaaactttatctcaaaaaaaaaaaatttttttttatgccaaactcaactacgcaaccaaatgtactgagtgccgactatattttatctaaacttacagctcatgaactcttctccctaatcctgagatgtgggttaatgaccccattttatagaagaagatactgaggttcagaagagttaaatccctcgggaaggggcagggctgggactgaagcctgtgtctagttggcatcactgttcccttctgacccatctggagtctcaccgggtctgtctggtactcccggctgtacagttcatggcagttattgaagatgtactcgtaggtagaattaaggcaggctttcacacagtcctttaccacctggctggctcggggcgggctctggagttcttgtacctgaagggagggagagaggcataggcggccacagctgtgacaggaggtccccaggaagtgactgcgagtcattttgggtttaaggaaatgaagtggtatgaaaggaaaaggttactgagaaaggctgccactctccaggaggaatgtcacttgtcctgggagctggggatcctagagaaccctccttggagagcaaaggcaactggatcctttcctaccttcatccgaaagaaggtgatgctggtgagaaggtccacagtggatttgaggtcctggagtctctccgggctgctggctgggaagttattctgttgggagcaggaagagatgtggggttatggaagaaggcgtggggaggatgggagactgcttttcagggggatacaaaggctccccggtttcaggctgggggttgattagagcacctcgaagcaactggggatctgcttggatgcaccaagcacattacggcaggtagtgcccatgcaggtgcacacatgctggaggaacacatcgtacatgcgaagatgggtcctcccatgcacacacctgctggtagctttcccctccaggcacacacatgtgcgtggggtgagcaaattctcatgcacacacttcctacccggtacatggagaggtcaatccgcagggagttatgcagctggtccaggagtttcacgaagcgctctttctgaggaggaaggggaggagggaggatggatggaggcaggacatggccgccatagtggctgagcgcctactgtacagtaagtatacctcatccaccaccctcataatgtccatttccattctatggcatttttttttttgttttgagacagagtcttgctctgttgcccaggctggagtgtagtggcgcagtctcagctcactgcaacctccgactcctaggctcaagcaattctcctgcctcagcctcccaagtggctgggactacaggcacaggccaccacacccagctaattttcttttggatttttagaagagacgggttttcaccgtgttggccaggctggtctcgaactcctggcctcaagtgattctccagcctcggcctcccaaagtgctgggattacaggcatgagccactgcgcccgacctccattctatagcattctacagaggaataaatggaggctcagagacgggaagtgactggtggaaagtcacacagcaatcaggtctagactggggacccagaagtcacatcagatctgaccggcataaagttgggctctccctaattctccaatcccagtccccaggactgaccccaaagttggaggcggcgaagcggtcggaggcagacacgttggtggaggcggtggtgtgtgcgtagtaggcattgatgttggcgagcagggtgctcatgacggcaggcacccctgggcacatatacttggaggagaggcaggcaaagtggctggagagagggagcaggaggcactaggccaggggtccagccaggatggaccaagatcccccctagaatgcctccaagatagcatctgtgagtgggtctctgtcacctcctaaaccatcccctgcctgattctgtcctttgggtctccgcatctcctctcccctccatctttatatccatttgagttgctctaattctgcttctttttttctttctttcttttttttttttttttgagatggagtctcactctgtcacccaggctggagtttagtggcgcaatctcggctcactgcaacccctgccccccaggttcaagcaattctcccaccctaacttcccgagtagctgggattacaggcccaagccaccacacctggataacttttgtatttttagtagagatggggtttcaccatgttggccaggctggtcttgtactcctggacctggagtgatccgcccacctcagcctcctaaaatgctgggattacaggcttgagccactgtgcccagcctctatctctgcttctaagtcttccctctcttccatgtcactccaggtgtcaatcacagcgctctcctgatctccaggggaattacggaacccaccaccaccacgcccacttcctctctgggtcttccccctgagaatccctcccaccccagacctgccagtgcccacttggtgacctccctcttgtttcctgcaccccagcctgcagtctcacgtcatggcttggtagatggactcgacgccgtagcgcatggcaaactcgtccacaatctcctgggctgtctcatcgtagtaaaccttccaggcatcgtcacccttggcatctgggatcttcacgaccccattgttctgcacgtcggtcacgaagtggaacaggttctgccaccatgggagagaaagtgtcatggagagtgcaaggggtcgccgggggtcagaggtcccagggtctggggcagcttacatcatccatctgcctgtttattcattaattcattcatctactcttttatccatccacacacccacccatctaactaccccaaatttcacccatccactcttccaacctttcagtaattcaaccacacatccatccatccatccattcatccatcccatacattgatccgcaacttaatccacctacccaatcattcattctttcatacaaccaaccatccatccacccatcaatttatccaaccatccatttttcgtctgtccaccagccactcacaaccatccatctaaatattcagaaattatgaacccaattatcaatacttgcaatagttcaaccacacatccttccattcatccacccacccattcatccatttgtccatctgcctatacatccatccatccatccatccatctacctatctacccatctgactatcaacaaattcacctatctactcaatcttccttctaataactcaaccacacttccatccatcccatccaatacaacttaatctgctcatccaacatttcatctatccacccagtcaatcatctatccagcaatctatctatccactcatcaagttatccatccatcattcatctatactcatccatcatctaacaattacccccaaattcacccatccatacatctatactttcaatagttcaatcatatatccatccatctgtccatccatccatcatccatctagccacgaatctacccaccaactcatccatctatccatccatgtactcacccatctctccatccatccttttatctactcatcactcattcatctgttcaatcattcattcattcaccagcatttattcaacaaactagttcctggggataagagttctttccaggaaacccaggcagctggaagagacatacccagacacaaacggcccaatcctgagtggttagggctggaatagaaggaagaacctgatgatgagtagtgagagtcaacctggaggccaaggtgggcttcccagaggaggtgaccctgaatctggactttgatggatagggaggagttttccaggtaaagggaatggcatggcgggcagtctcagagggccaggagagtgtggatggtgtggccagaaagaggaagagctgggcaggcaggaatggtgagtggaagtggcatgggaggggccgagcaatgaccctcacctcatgcagacaggtgtactggacatggtacggggccaccttctcctcgcctttgatctccacactgatgtggagccggatggcacccgacacggcagatttgtcagttcgcttgtctgcagggcagaaaaagaagacagtgtcagaacttcccactatagcagtgggcaatttttttttttttaagagggagtcttgctcttgtcacccaggctggagtgcagtggcacgatctcagctcactgcaacctccacctcctgggttcaagcgattctcctgtctcagcctcccaactagctggaattacaggtgcctgccaccgtgcccagctaatttttatacttttagtagagacggggtttcaccatgttggccaggctggtctcgaactccttacctcaggtgatccacctacctcagcctcccaaagtgctggaattacaggcgtgagtcaccgcgcccggccagccatgggcaaatttttttttattttatttttttttgagatctgtggtccaggttagagtgcggtggcgcaatcttggctcactgcaatctccacctcctgagttcaagcaattgtcttgcctcagcctcccgagtagctgggattacaggcatgtgccatcacacccacctaattttttatttttagtagagacgaggtttcaccatgttggccaggctggtctcgaactcctgacctcaggtgatccgcccgcctcggcctcccaaggcaatttttaatagatacacgattctgtagtcctcccagacttccggaaactaaggctttggtgtctctcttctgattggctccctaggcttgagtctccctgtttaggctagaattccttaagccctgtctcttccttcaaacaaggatcccagaccttgcttcttcactcagattaagttcctggctatgtgcctccctccttagactagcagccctaggccccacttctttcccagtctgagctcccaggccctgcctcccccatcagatcatgctccccggagactacacatcttagacactgttcctgggtctgtgcctctctcctcagactaggaccccctggtcttgtctcccacctcccccatcagaatgggatatctagatgtcctccaatctaagaggtttccgggctctgctcacctctctcaggctgggtcctttctaccccctcagattaggctcatacaccctgcttcctccattagattggactccccagattctactcaacttccttacacagggttctttgatctgtagcagccatctcagattaggattcccaaacaatacctccctctttagactggattcttttcttgtggtggggggtcggggggacacagagtcttgctctatcgcccaggctggagtgcagtggcatgatcatagctcactgcagcttcaacctcccaggtacaaatgatgcttccacctcagcctcccaagtggctgggactacaggcacgcatcaccacacccagctatttttttttttttaatggagacaaaggccttgttatgttgcccaggctggtctcgaactcctgggctcaagtgaccctcccagctcagccacccaaccaatatgttgggataacaggtgggagccaccatgcccagcctggattccattttttttttctttttcttttgttttttttttttttttttgagacggagtcttcctttgttgcccaggctggagtgcaggggcttgatctcgccatgttggacaatctggtctcaaactcctgacctcaagtgatctgcctgcctcagccgtcccaaactgttgggattataggcgtgagacactgcacccggccatatttgttttttgagaaagggtctcactctgttccctgggctggagtgcagcagtgtgatcacagctcactgcagcctttacctctcaggctcaggggatcctcccaccttagcctccagagtaggtgggaccacaggtgagtgtcaccctgcctagctaatttttgtatcttttatagagatggggtttcactatgttgcccaggctggtcttgaactcctggactcaagtgattggcctgcctcagcctcccatagtgataggattaattacagatgtgagccactgcccggcgcccccagcctggattcttttttttttttttttgagtgggagttttgctctcgttgcctaggctggagtgcagtggcgcagtctcagctcactgcaacctccgcttcctgggttcaagcgattctcctgcctcagcctcccaagtagctgggactacaggcacccaccaccacgcctggctaatttttgtatttttagtggagacggggtttcaccatgttagccaggctggtctcgaactcctgacctcatgtgatctgcctgcctcagcttcccaaagtgctgggattacaggcgtgagccaccatacctggccccagcctggattcttaaagctcaatcttctttcttagatttagttcctaggtctctgtctctcccctcagactaggattcccagttcttgcttcttgcctcccccattagactagaacatggagattctgtccccaccctccctcctaagctgaactaagaggttcctgggctctgctcaccctcctggcctgggtgcttcctgctcccatcaaactgggctcctagaccctgcctcccccatcagattatgctcctcgaccaaactcctcctgagaacacatctctctgctcttcgtgggctccatgctctggctggatccctgggacccgtccccacccgcttcagaacccagcttctctcacccaggttgtaccacacgtccatctcgccgctgagcgtccgcacctcaatgatcgtctgccccaggaaatcgtcagattccctcttgaacctctgtttcacgcgggatttgatgtcgtcatcctcgtcccagacgcgcaccttgatgcggtcggaggaattgtgacattcactgtggcgggaggaggaggcagaggcaggggtcaggcagccagtgtgagtcctgtccttggagccctcttttggctgccccagcaggatgccccacatggggccagggacccagccaggcacttacaagtggaaattctcctcccacaccgggttgaggttcccatagatggtttttgtccgtttcttggtcttcccgacctggacggtgacataggggtcactggatcctgtcttgtcctttgcctgcaagccctgggcgcagaccactggaagacacagagggcatacacaggtgtgcactcaagaagcgaggcatgctggggacagtcactgccacacgctgcaggctgataattgggacacctgcagcatggctggagagcaatggcagggcacgctgggcttgccagagaggttttttgtgtgtttgtttgtttgtttgtttgtttttgagacagagttttgctcgtcacccaggctggagtgcaacctccgcctcccgggttcaagcaattctcctgcctcagcctcccaagtagctgggattacccgcacgtgccaccccatccggccaatcgttttgcatttttagtagagatggggtttcaccatgttggccaggtcggtctcgaattcctgacctcaggtgatccgcctgcctcagcctcagcctcccaaagtgctgggaaggagtccccaaaccatgaaggatgggaaggtgccccagctgccttgcgcatgggtaggacctctctcaggtgtgaactccctgaggtcagacacttacaagaacccattgccccccgagatctcctgctcgttggtgccccctgcagggttccttccctccctgacttaccaccccagctccgtcctggggtcacttcctggataacccacataacctgaaatcctcatcctcaggtctgtttatggggaaacccacatgaggctgggtgtggagaaaagccagtatcctcgcccctaagtggggccacactgagctgcatgctcgacattgtccccagtggccccaggatgggctgacccccttgcccacagcattgtctgctcaacggcatctccttcaggactccttccatccctgtctcaagtccttgcccctcaccaggactttctggggtcactttccagataaaccatgcaccctcaattcctcttcttggagtctcattctggagggcaccatccaagacgcacccagatacagtgccatgaacaggcgtttggaggcacgcatgtccccccatatgcgtgcacacacggagatgagatggaatgcacccgaccgagtgagtgcgcgctgcaaaggagagggaccaggccatgggacagggcatgagacaggtctcagagggtggagaaggaggggccctatggcggcccacgccccctcaccggtgatgctgatcttggcggaccacttggacgtgccgtccagcacgctctgcttgaccgccttcatctgctgcgtgtgcgccgtcttggtcaccgcgaagatctcctggatgagctcgaagatctcgggcttgttgcgctcccggatcttcatgcggtccttgagcaccatgatgatgttctgtgtccggtcctccgccccgtgcttggagctcttctccgcagcccctgaggacgcccgaggccggcgctgaccccagcgcgccctgcatagtggcccctcaccaaggcgagagccccgcccctactcatcaaccggggggactcaggtgtcaccccctgaagccggtttcctacctgctttctgtaccccccacccagacccttcacccttccacctcctctcggagccatgctcctctgagtcgccatgtccctgcgtcctgcccttctctgccccgcaccccttggagtccccactggtttttggagccccacccctctaaggcctcttccctaagccccacccctctgagtccccgccccctctgcgtcccacccctctgaatctccgccccctctctgagtcccacccctctgagtcccgctgcctctctgagccccactcctctgaatcccctcctcgtctctgatctccacccctgcgagtcccctccacattcctgagccccttccatctctcagacccctccctttctcttggtcccacctcctctgagtcccctcccccttccaatccccccctccacagtcctctcgcagtctgaaccccttccctctctgagcccctcttcctctcagagctacccctagctaacccattttatccaggggagctgcctcttctcactaagcctgtcctttgcacaacctagctagtccctgagccctgccccacccctctctgacaccctcacagcttctttccccacccctcgaccccctagcccttccaccagggagtcctgcgcctttaaccccacccctccctttcagcgagtccctcccctgcctcacgacgccccgccccttgccccgccccatggtgccccacccatcgccttgcccttcagcctttccccgccatgcaagccccggggctccccacgccaacccgtggccctgcgctcaggccctgcgctcacgctgcaggcagtcggcgttgagcaggtcctggcacttctcgtggcacttgacaccgcactcggtgcagcgcatgccctgcctcgcgatgccccacagcagcccctcgcactcgtagcagtaggtgggcgtggtggccgtccacacttcgaagttgtgtggcgtcgtgcacgagatggggtagattaaggcttgcagggtcttcttgtaaacgtggtttttctgcagggagggatggggtgcggtttgggggcgcctaacctggcgctgtccctgtcctgccccattccgccccatcactgagcgcggtaaagtcccaggccctcccctgcctccacgctgtcggaatccacgctgccttctgccagtctgtgtcacacacacacccttcctcttcccggggacccacagaggcttggacaattccagaagctcctagcccagtccatccctgacccggggaaaaagaggtgccccacgcaccagctcctcgttgttcaacgtgctggaggccaaggccgaggtgatgcccgctttcctggactggaccagggactggggaggtcacagaagagggagtcgggggggttgacatccatgagatcaccaccaggagagttcacagccacggatggggccagcagccacattttggagccacaaccgcaagttggaaacaggtcaccgacagcatccgggccagacccaacaaagaattaggaggtgacagaggctttgagttagaagggaccctggaaagtgagcagccccgcacccctgactcacagcatccaacacagtgggacatggcaaggttcccccataatccatgaattgggggcctgttagaagatcccagtgggggagtttggggagaagatcccaagaggcccatgtcgccatcactcaccatggcctgaagtgtccacgcagcacatgggggtagaaatcagactacattagtctcagagaatgcctagctggcccccaaccccaggttgaccatgggcagttccacaggttgtgcactgcttatagcaggcctgctctgctcagggagtaaagggcgagggtgcttaccaagtcgctcacgagtgggataggtttcctcttgcggatgtctggcatgctgtcgatgatgatgagaccgccccctgggctgaaagacacagagggacactgagggcccagatgtccctattcctcacatagagccctggggagaacattcaacctcccccaggtgttaaggggttgaattgggtccctcaaaaaaaagatacgctgatgccctaacccccactacctcagaaggtgaccttacttggaaacggggttgtcacagatgtaattagttaagataaggtcatactggagtagggtagacacttaatctaatatgactggtgtccttagaagaagagatacatggggagaaggtggctctgtgacagcagaggcagaaagcgacgtatctacaaaccaatactcgggggccaaggaattcaagcaaactagaagctagaagaggcaggggaggaattctcttctacagatttcagagggagcatggctctaccaatgccttgatttcagacttctggcctccagaactgtgagagaatacattgctgtggttttaagctacccgtctgtggtactttgtgacagcagtcctaagaaatggagacacccggcctcaccctcctcatctgaaaaatggggagatgatgtaattgcccaccttgaatgaaaacgtgaattaaggcaaatctaaataatatactaaaatataaatgaggccaggagtggtggcttacgcctgtaataatcccaacactttgggaggccgaggcgggcggatcacctgaggttaggagttcgagaccagcctgaccaacatggtgaaaccccgtctctactaaaaatacaaaaattagccaggcatggtagtgcatgcctgtagtcccagctactcaggaggttgaagcaggataattgcttgaaccaggaggcagaggttgcagtgagtcgagatcacgccactgcaatccagcctgggtgacagagcgagactctgtatcaaaaataaaataaaatatagatgaaacctttcttggctcattgcaacctctgcctcccaggtttaagcaattctcctgcctcagctccccaagtagctgggattacaggtgcccaccacaacgcctggctaatttttgtatttttagtagaaacaagctttcaccatgttggccaggctggtctcgaactcctgacctcaggcgatccgcccaccttggcctcccaaagtgctgagattacaggcgtgagccaccatgcccagccatctttcgaaacaagatctcactctgtcacccaggctggagtgcagtggcacaatcacggctcactgtagcctccacctcctgggctacagcaatcctcccaccttagcctcctgagtagctgggaccataggtgtacaccgccacacccagcaaattttttttttttttttttttttgagatggagtctcgctctgtcgcccaggctggaatgcaatggtatgatcttggctcactgcaacctctgcctcctgggttcaagcaattctcctatctcagcctcccaagtagctgggattacaggtgcgcaccacgacacctggctaattttctgtatttttcgtagatatggggtttcaccatgttgaccaggctggtctcagactcctgacctcaggtgatcaaccgcctaggcctcccaaagtgctgggattacaggcatgagccactgcacccggcccacacatagctaattaaaaaaaaattcttttgtagagatgggggtctcgctatgttgcccaggctggtcttgaactcctagcctcaagtgattctcctgcctcagcctcccaaatagctgggattacaagcatgcaccaccacacctggctaattttttgtatattttagtagagacgggattttgccatgttggccaggctggtcttgaactcctgacgtcaggcgatccacctgcttcagcctcccaaagtgttgggattacaggcgtgagccaccaagcctggccccgaaaaggttttcactggccagtgagataggtgcctgcagccaatgactccagacaagccctgcagggctattcaacctacaaagctttctgcaggagccaactgaggcttagagactcctaaaccacatcttttctcggcagcctccccttgtctgacaggtttctcccgagagcacatccttcataaatcacgtgcacaggaatccgcatttcaggacccgcatccaaggctctctagctagggtacctgctcatttatttaggagtcccagctgctgtctccctgcctgtttgccaaggacgtacaaggaaggtcactatcgtgctgctattttaaaacctgagcatatttttaaaatatcttgtgcatcctctaacctgaaaatccataacataagaggttagacatgaccacattctccactgaagactaaacaactatctttaattaaagagcccacaactgtagcaataatcaaagagatttaaaaatagaatcaacgcaaaaattttgctccaggattacaaatatatagtgtacatttcccaatagtgtctagttcctcatagtgtctgctttatcttacatttatttatttatttatttgtttgtttatttttgagacagtgtcccgctctgtctcccaggctggagtgcagtggtgcaatctcagctcactacaacctctgcctctcgggttcaagtaattatcttgcctcagcatcccaagtagctgggattacaggcgcctgccagcatgcccagctaatttttgtgtttttagtagagacagggtttcaccatgttggccaggctggtttcgaactcctgacctcaaatgatcctcccgcctcggcctcccaaagtgctaggattacaggcatgagccaccgcaccccgccctgtcttcaaagattactgtcttttgtgtctgcgtatggctgtgtgccttatgaaagtgacgtattttgcccaagctcaatctgtcccctgtctaaatggaacccctcctcctcctctctgggctgaggctcaggcgcaaaccagccttggacttggggttcaaatcttcctcccaccgctcacagtttcattacttacccgcctttgaaccatagggatttagacatctctccttctccccgggcctgcaggacagacagacagatatggtcagtgtggctgtccctcccctccccagagcaggctccacacccacttctgactcccctctgggctgggagtcagatggcctgggtcctagtcctggctgagtgattttaggaagctccgtggctatctctgggccttagtttgtccatctgtaagatgggctgggggagaaagaagctcttctctttcaaccacctcaatggacctcagtctcttcattgattattccctaaaccccctatagtctcacttgttcatctgctctcttgcctcgggctctttccaggagttgtgacttcagcttgtacctcttcccaccttctgcagccaaccagcctctatttatcattcgggtctcagcatagacgtggggtccacagcccctaccttccctccatcttgtaactaaagggttaacatggggggaggggtggccctatgaggaacacaggcagcactcttctgttctgaaatattgagggggtgtttggtttttttttaaagacagggtcttgctatattgcccagactggtcttgaactcctggcctcatgtgatcttcctgcttcagcctcctgagtagctgggaccacacacacaagccaccacactcagctcctgaaataaatatatatatatatattttgtttgtttgtttgtttgagacggagtttcccttttgttgcccaggctggagtgcagtggcgcaatctcagctcactgcaacctccacctcctgggttcaagcgattctcctgcctcagccttcctagtagctgggattacaggtgcccaccaccacacccaattaattttttgtatttttagtagaggtggggtttcactatgttggccaggctggtctcgaactcctgacctcaggtgatccacccacctctgcctcccaaagtgctgggattacaggcgtgagccactgcatccggctctgaaatattttttatttttttcttttagagatgaggtctcactacgttgcccaggctggtctcaaactcctgagtgcaagtgagcctcccgcctcgacctcccaaattgctgggattacaggcatgagctcctgaaatattgttgaaataaatattttggatatcacttctctttttttttttttttttttttttgaaatggagtctcgctctgtcacccaggctggtgtgcagtggcgcgatctcggctcactgccagctccgcttcccgggttcacgccattctcctgcctcagcctcccgagtagctgggactacaggcgcctgcaaccacagccggctaatttttttgtactttcactagagacggggtttcaccatgttagccaggatggtctcgatctcctgacctcgtgatccacccacctcggcctcccaaagtgctgggattacaggcttgagcaaccacgcccggccatcacttctccttaagtgtcatctcctccagggagttttcctgattgccttggattagttttatgcttttcctatgaaacccagagagccttccatgtgtctttttcttgtcatattactagttccatagtttgtttttcttgtatatcacatagttccaatagtagctgctattttttcaatttaatttcttgacctagtggaagttatccaacagccttttcactgtgtcctcttccacctgtctcatttagaaccatatgtatgtactgctgagtcaaaaaatagatttctattttaaaactgttaagaaatttcgtttggtaattttgtggctctgatatttgatggtctaaacctttgggagtctgtttagaatctcctcctgccaatcccactgcagtttggagggtaactctgaagagcaacacagctgtccccagcccagggtgagctgaatgaaggaataaacgaatggcctcaaccctgctgcccatctaaacagtcagcttgcccctgatgctgattgcttcccttgattcctactcccctactgagccggccccagacctttccctaaccctgacaatgacctccaatttggccctaagcactgacccctttgcctaacaccaattctaaccctgacctctgatctttgatggctgaactaaccctgaccttgatccctaaccatgacttcagcccagtttcagccctagttttctctcctccctctagatctagaaaccccaggctgacattgggaaggaggctgggctggggatgtgtggggccagacttggtgcatggtttgggagttagcatagccaggctggtgtggacgggccatggggataccctgggctgtgtgtgtatgtggctaaggaagggtcagagtgggtggggcatcggtgacattgggtgaggccaggctgaatgagggtggggccagggaagggctcgagtggctggggcatgggcacagtgtgggcactgcactgggcatgcccaggctaggcttgggtacgggtggggtgttgggcgtggccaatataggtgtgggtgtggccaaaacatgtgtgggcctgccattgggcgtggcctggctaagtgtggcaggggcatggctgggcgtgtcactcacctcctgcagctgcatccgcaccttgttgaaggcacgcagccagttggccttggccctggacatggagtcctgcccctcctggccttcctcatcctctctcggcctgaaactgaggcagggaacgctatgaggctctgggctggctctccgtgacccctgaacttcccttgaccctccagctgtgcaagtgatgcatagctccccatggtatctctgacccctcagagacattaggacccacgtgagtcccctggcccacctcagtgcccctcaccccttcccacacacccaatgcttctgtgacacttcactgttcctcggcttccttttcaccagcccagcccctctggccccccatttgcccaggatcttgacctctccgaccccagcaaccactaagatcacaaactctaagtctccttcacggccccttgaaccctctttgacctccctactctgccctgtcacctctgatccctttaagaaacccaagagcctgtgacaacttcagccccagcaacttcccaggtccacgctgaccccatcatagccctgctgaccctgtgaccttgtggcagcccctctggccccttggccccgtcctgttacctctcctcgtccttgggtggctcagcctcagggatctgctcagctgcaggcaccttgtcgggcgtggctggcttgggggccaccttggccatgtcgggggcctcggtgggtgccactggggccttgtcctccttccctggggcagctggcgggaggctgatgcgtttgaagtctttgggctcagccacagctacgtcttcacgctgggcatagctgcccaaatcgtcaggcacctcctcctcctcctcctccagctcctcctcatcttcaggcagctcctcctcctccaggaagtcctccaggtcctcctccagctcttcctcatcctggtcccagcgaggcgagtctttgtggtagctgaccgagctgtggcaggagtggtaggagtcccggtcccgctcatcctccatgtcggagccctgcaggctgtgctcgtcagggtcgaagtcctcgctcagctgagagcttccctggctcagctccccggaagaggcatagcggctgctacccgtggggctgtggggatggaacagggttcagggactggggtaccgagtcactgcccacctgagccccagtcacacaggcattgactcatcaccgactgagcacctacgatgtgccaggtcctgctctaggggctggaaaacacagccatgatcagaaaagacaaaaatccccgcttttggccaggtgcggtggctcacgcctgtaatcccagcactttgggaggctgaggtgggcagatcacctgaggtcaggagttcaagaccagcctggccaacatggtgaaaccctgtctctaccaaaaatacaaaaattagctgcgcatggtggcgtatgcctgtaatcccagctactcgggaggctgaggtagaagaatcacttgaacccgggaggtggaggttgcagtgagctgggatcatgccattgcactccagcctgggcaacaagagcgaaattccgtctcaaaaaaaaaaaaaaaaaaaaaaaaattcccacttttgtggcatttgcggtctgtggggaacaggcaattgactgtgctgggaactcagggtcagcgccatcaccacagccccgcagcaggtctcctgtcctccacctggaaaaagtatgggaaatgcatccacttccccgtaccccgggccccaacccaggccagcctctgctgtctctaccagatgctgtctccacagttcctgcttcccttggaagccacagggaattgtaaatccaatcacctccctcccctgctctaaatcctaccatggctccctagtgccttggaataaaatctgtgctagccctgtgtggcccatacgctccaaactccccctgcatacctccctccacttctccccgcctcctccattccggccacgctggccacctcgttgtctctccaacaccataaacctgtgcacttgccgtggtctcttccttgtctgctttatctagcaaactcctacccaccctctggtacccactgaaacatcacttacttgtgcaaatgccccccactgtctggccaggtcaggccctctgttatgtgctgcttatgtgaacccaggatcgtgctcaacgtcaacagcaatatctgtctctgtctaaatacaggcagggggacataggggccaccactcagccctcttctaaccattcacttagtcattcaacgaaccttatcatttcccgattagatacctcctccaatcttagcgcctgagaccctcttccctggccagcctcgaggatgctataggaataaaaaggggttcaagactagcccaggcaatggagcaagacccccatctccacaaaaaataaaaataaattagcttggtgtggcggcctgtgcctgtagtcccagctactggggaggctgaggcaggagaatcgcttgagtctgggtggtggaggttgcagtgagccgaaatggtgccactgcactccagcctgggtgacagagcaagactctgtctaaaaaaaaaagaaaagaaaaaaaaaaagaaaaaaatggttaattcccacaagaaaatgtgaattctgccctcctggatgggtgaattctgcccttctggaactccacctccagctctgtccagccccgtacccctctctccactccaggagacacagcaggacccacatgcatgctgcactccgcagcacctacctgagggcttgtggctcagagaactcctcgtaactgtgcatggagtcactgtaggactcccgggagcccaggggtggtgggcgaacagaatattggtggactgaggcgttgggttgtgacgtagtataatagggcggcgggatgctgttgctcgtttcactgcggtagtcactgtcacgatcatccactgcactgtcggggtcatcgtctggaagagagaggcggtatgggaagagggtgaggaagagagagtgcacatgatgggagccaatacaatttcccagacttacggtgccgctaccgaagaagagaattttttactagtatggataaagaattgtgggtcatgttaatagagatataggcttcagaacaagggaggtgaaaaccctgctttgctttatgtgggtcaaattggacctaaagtctaggggctagggtaggacctacaatgtgaagaaaacagggacagagtagagggcatccttcagctcaaatgtgaagaacaactttgctgaaggtcaggatctctgaaaatgacatgggatttttttccactgagcagttagtttcccataacaggagtcacacagacagtcagggggaagttggaagaagatcaggagttcaaagtggacggaacgctctttaacccttagagatttcctgatatctgagggtgacgaccccagacctgaacttaacaaatatgcaagaaccaagaagatgctgagacatggttctgtctttttcaaaaaggattagattcttagcttggcaaagccaccacacacttggaatctattgctaaaatggaatgtggtagagttgccaaacttcatgtttaataagaactaaaagatattttggtttagtttggtttccttagaaaaaagaacagtttgttttctaaatcctaaaaaaaaaaattccaattctaaaagcaacatgtctgggtggtggcataattggggattgtacattttcttctttattcttttctgtaccttctgaaaaaaaagatttcaataatgcaatctttttaattttttaactaaaaagaatgataaagttatctttattttaaaagtaaagcaaaggccgggcacagtggctcacacctgtaatcccagcactttgggaggcggaggcgggcagattacttgaggccaggagttcaagaccagcctgggcaacataccaagaccctgtctctactaaaaatacaaaaattagccaggtgtggtggcatgtgcctgtaatcccagctccttgggaggctgaggcaggagaatctctggaacccaggaggtggagattgctgtgagccaagatcacacctctgcactccaggggctgggtgacacaagaccctgtctccaaaaaataaaataaaataaaagtaaagtaaaacctagtccatgggccaggcaaagtggctcatgcctgtaatcccagcactttgggaggccaaggcaggaggatcacttgagcccaggagttcaagatcagcctgggcaacatagtaaggccccatctctttaaaaaaatttaaaaattagctgggcgtggtggtgggcgcctgtagtcccagctattcgggagggtatggcaggagcattgctggagcccaggaggtcgaggtagcagtgagctatgattacgcctctgcactgcagtctgggtgtcagaatgagaccctgtatccagaaaaaaagaaaaagtagtccatgaagaaaacatgagaagtacgggtaaggggaagaggatgtaaaaaaatgaaaaaacccccagaccccaaaatctcagagcaatgagtgaaaccttcagacttttgctgtattcatccattcatttagacagggtctctctcacttgggctggagcgcagtggcgcgatcaaaactcactgaaacctcgacctcctgggctcaagagatcctcgcatctcagcctccacagtagctgggaccacaggcacacaccaccacacccagctaattttatttatttattattttgtagagatgggatctccctatattgcccaggctgatcttgaactcctgggctcaagcgatcctcccgcctcagcttcccacagtgctgggattagccgtgagccacctcggccggccagcattctttctatccaattgtccttgaccgggctgagatgtttccagccaaattgcatgaggctgtgcacatgtttacccagtttttttttttcctgacaaattatctgcttatgaagggtaaattactttgagttggattctttttgcttttgcccaggctctgctttctactaagtagctcttgactaaattgcctgcttctggctattttcaaccacttttgttttaacccaacggtctgttttcggttcaattgtctttcctttttgacccaattatctatcagctttagctgcattggtgttttgttttgtttgtttgttggtttttgggttttttttttttttgagacagagtctcgctctgtcacccaggctggagtgcaatggtacgatctcggctcactgcagcctccacctcccaggttcaaatgattctcctgcctcagcctcccgagtagctgggattaaaggcatgcaccaccatgcctggctaatttttgtatttttagtagagatggggtttcgtcacgttggccaggctggtctcgaactcctgacctcaagtgatctgcctacctcggcctcccaaagtgctgggattatggtgtgagctgccacgcctggtctatctttgcttttgaccgtactgttcgtttgtggcaagttggttgttatcgagcttgccctgtctgccaagcattcattttggcaaaattgattttatttatttattttaatctatttattttttagagacagggtctcacactgttgcctaggctaaagtctagtagcacaatcatggctcactgcagtcccaacctcctgggctcaaacaaccctcccacctcagcctcccaaatagctgggactacaggggcgtgccaccacacccggccctttttttttttttttgtagagatggagtcttgctctgttgcccaggctgatttcagactttggagctcaagcgtccctcccgcctcagcctcccaaagtgttggaattacaggtgtgagccagtgtggctggcctaagttgatttttaaccaacttgtttttgataaattgtggtggaccaaagtgtttgtcaacagtttcactggtcctggagttaggtttgtccaccaggatatgaggaaggagtgaaggactccccagttgaaggagagagaaggaggcagatttatcctcaaaatagaggactggccaggcatggtagctcacacctataatcccagcactttgggaggccaaggcgggaggattgcttgaggtcaggagttcaagaccagcctggccaacatggtgaaaccccatctctactaaaaatacaaaaattaaccaggcatagtggcgtgcacctgtaatcccaactactcgggaggctgaggcaagagaactgcttgaacccgggaggtggaggttgcagtgagcagtgatcgcaccactatactccagtctgggtgacagagcaagactccatctcaaaaaaaagaaaaaagaaagaaggaaagaaagaatagaggactggatttctctagaagaggcggggtatgggagaaagggagcaactctttagggcatggatctggtctgtggcctgttaggagctggggcgcacagcaggaggtgggcagcggttgggtgagcgagtgaagtttcatctgtatttacagttgctccccatcactcacattaccgcctgagttccacctcctgtcagatcagcggcagcattagattctcatagaaggccgggcgcagtggctcaaacttgtaatcccagccctttgggaggccaaggcaggtggatcacctgaagtcaggagttcacaaccagcctggccaacatggtgaaaccccatctctactaaaaatacaaaaaattagctgggcatggtggcacgcgcctgtaatcccagctacttgggaggctcaggtacgagaatcacttgaactcggaggcagaggttgcagtgaggcgagattgcgccactgtactccatccagcctgggcaacagagcaagactctgtttcaaaaaaaaaaaaagattctcacgggagcgtgaaccctactgtgaactgtgcatgtgcgggatctaggttgtgtgctccttatgagaatctaatgcctgatgatctgtcactgtcccccatcaccctaagatgggactgtctaattgcaggaaaacaagttcagggctcccactgcttctacatgatgatgagttgtatcattatttcattacatactataatgtaataataataataataaaaataaagtgcacaacaaatgcagtgaacttgaatcatccagaaaccatcccccaaccccagtccataaaaaaattgtcttccatgaaactggtcccttgtgtcaaaaaggttgggaaccgctgttaggtagaaaaacggacatttaattagggccaggtgccatggctcatgcctgtaatcccagcactttgggaggccaaggcaggtggatcacgaggtcaggagatcgagaccctcctggctaacacggtgaaaccccgtctctactaaaaatacaaaaaattagccgggcgtgttggcggacgcctttagtcccagctactcgggaggctgaggcaggagaatggcgtgaaccctggaggcagagcttgcggtgagctgagatcgtgccactgccctccagcctgggtgatagagtgagactccgtctcaaaaaaaaaaaaaaaaaggaaaaggaaaatggacatttaatttagggagggggtggcttgccttattccctgggagagcaaatgaaggtggaaggtgaggtgtgagtgtgggtggacctggggggtgctgaggtccctgtgtgcatctccctgaggtccctggcctgccgttctgttagagaccccgcccacccactaccctctgagtgacactggacacatttccaagtggagaaggaagataggaagaccaaaaggcaggggctacaggagaggaggtgaggttatacggcggagtggggtgcgggggtcacagtgcccagctggagacaagcaggttgttggtctaaatgtccactcctccaggctaaccccccccaccccaccccaatgacggtgcccactccccagcagatggcaggcctcccaagacaggcactaatgaacagggtacaggaaagcttgaaaggggtcttgctgagccctctggcccccacgtgctcgtcacaggctccttgcttccctgtgtggtagtggggaggggccttgggatcaccaaggtgcccaccttcccatgtaactcccagaacatcaatcaggctgagtacttactgtgctgctcaccccagccaaaataattccagttgcctacaaagagaaggggcagaaataataaaagggagcagacagaggggtgggtgtaggaagggggctcccctgctgtcctcactctccccaactgctccccccaccccaaaagtccctcttgtcctgagtaccttccctgagtatcaccttcattgctgacacttgctgtgtctctgctctccaccttgggaggaaggtgggatatccctgtttgtttatttttttcttttctttaattttttttttgaaacacggtctcactctgtcatccagcctggagtagagtggtgcaatcacggcttactgcagcctccaatttccaagctcaagtgatcctcccacctcagcctcctgagtaactgagattacaggcacacaccaccatgttcagctaatgttttggttcttggtggttttctttttgtttttttgtgtggagatggatcttgctatgttggtcaggctggtctcaaacacgtggtctcaagtgaggccgagtagctgggatttacaggcatgagccactgtgcctggctcagttttcaatgagaggaaaggctcagtcaggaagtaacaaagtgggtatttgggcccagggttttctgactatgatgtctagggttagcagtctcccagtctccacccttttcctctcccagctcttggataaggaaagacacactaaattggaaaccctaaggtttgaaacacccctgttgggtggattttatcattctactcattttatgggtgaaactatggggctcagagggatggagtgagcagcccaaagtcacagagcctctgcgcatcagggccagggcgagaaccacctttgcctatcacgtgcagtacctggcacttcagaaaaatgtcctggaccagaatcctggctcctctgaccattggctgctttctctgagaaatagggtgacaaaatactccaagggaggacttgtgggtaaatactgagtggtggtctccacttcccaaaatgaacctgcccctagctctagtccatctgcccaggggctctctgccattgccttcctgcctccactctgcctggccccgcccccattgcaacctctcaatgaccccattcaccaagcgggggtttgtaattccttccaggcagtgatgacccctccctggccagggaagccaaggaactttctcaatatcactccccaagttagtgtggaaacagggtaccccagctggagtatcccaagccctcctcaaccccggttccattaccaccctcctggacacatggtgagggagacacagatacagggagagctgtgagaggggagaaaaggaagatggaaaagcaaatggaaaaggtgccaggcatggtggctcacacctgtaatcccagcactttgggaagctgaggtgggcagatcacatgaggtaaaaaatttgagaccagcctggccaacatggcaaaaccccatctctactaaaaatacaaaaattagctgggcgtggtggcatgtgcctgtaatccccactgctcaagaggctgaggcacaagaatcactcaaatccgggaggcagaggctgcagtgagccaagatagtactattgcagtccagtctgggtgacagagggagactctatctccaagaaaaaaaaaaagagaagaagaaaagaaagtaaatgggaaaggagaaggaggctaaagagtgcagtggggttttggtgtcagcaggtgggagctctgccctgaggctatatgatttgctacttcccctccaccacagagcaatgggaagtcattttaaggagggagacagctcctccatccatgaaaagacctggtctggatgcatctgagtgtccacaaggcccaggaagataaaaaatcttgacaactgcagccttgatggaaataggaagaggaacgtgatcatcatcatcattaacagacaaggtgcagtggaaagggaagcaaagttggagtccctcagacctgggttcaaatcctggctctgccagttgccgggtgtgtggccttgggtaaatcacatctcctcttgggcctcagtttctccatctaagaaaatgggttagtgaaacagccttcgtctgttgtacgtgcgcccattgtacatgtgctggcaggatcttctgcctgtgtctgtctgcaccatctgacgtgggctgctcggggtttgtgctggccccatgaatagtttgtggaatgagttatacgccctcatccaggatctgatgaatggaagtgaagcatctacgaagtgtttttcatgtctctagatgtcccagatccttccaacagccctcagagtgagggggctgtcagatgcgctatttcaaagagagggcccctaaatatcgaagagggacactggcctgcccatgaccacatagcaaggtgggaatcaagcccaagtctcagaactctccttccttccttcctttcttccttcttgtctttcatcaagcccaagtctcagaactcttctctttcctttccttcctttcctttctttccttcccttcctttcttttcttttctcttttcttttctttctttttctttctttctttcctctcctctccttccttcctttctttctttctctctctctctttctctctttctttctctttctttccttccttctttttttgagtcagagtcttgctctgtcacccaggctggagtacagtggcatgatcttggcccactgcagattctgcctcctgggttcaagcaattctcctgcctcagccttctgagtagctgggattacaggcacccaccaccatgcctgttcattttttttgtatttatagtagagatggggttttgccctgttggccaggctggtctcgaactcctgacctcggcttcccaaagtgctgggattacaggggtgagccaccatgcccagcctcagaacgctgatttctaatacactgtaagtggacactgcactctcaggacttgtatctccggactggaggagcctttagacaggacagtcatggggtaggggagggatgaggatttcagctgatacccaaggaagaatcaagaggtacttacagcactggttgctggggacaggcagaggcttgtcttgctcatcttggaacgaatactgaaggggtggaggaaggagaaagggcttctctcagaggggccaaaggccaggggaccaggatagtcctctgttctgtcccatcccgacttccctctacctcccaaattctctccctctctatgagaaggatacagggagtaagagagaaaaggagagaaagacacacacacacacgagagagagagagagagagagagagagagaaagacagagacagagacagagacagaaaaagtaagaaacagagatagaaaaaagactaggggccaggtgcagtgactcacacctgtaatcccagcactttgggaggccgaagcgggcagatcacgaggtcaagagatcgagaccatcctagctaaacggtgaaaccccgtctctactaaaaatacaaaaattagccaggtatggtggcgcatgcctgtagtcccagttacccgggaggccgaggcaggagaatcacttgaacccgggaggtggaggttgcagtgagccaagatcgtgccactgcactccagcctggtgacacagcgagactccgtctcaaaaaagaaaaaaaaaaaaagatgggaacagtagacattggggactccagaagggaggaaggagggagcaggacaagagtgaaaaaactacccgttaggtactgtgtttacaatttgagtaatgccatggaattccagaccttagcatcatgcaatatattcgtgtaacaaacctgcacatgtatccgccaaatgaaaagtaaaattttttattttattattattatcaatattattattttgagacagagccttgctctgttgcccaggctggagtgcagcagcgtgatctcggctcactgcaacttctgcctcccagattcaagtgattctcccacctcagcctcccaaggagctggaatgacaggcgcccgccaccatgcctagctaattttttgtacttttagtagagacggggtttcaccgtgttggccaggctggtctcgaactcctggcctcaaataatctgcccgccacagcctcccaaattgctgggattacaggtgtgagccactaagcctggctaattttttttttttttttttttttttagtagagacggggtttcactgtgttgaccaggctggtcttgaactcctgacctcaggtgatctgcccaccttcgcctctcaaagtgctgggattacaggcgtgagccactgcgcctggcctctgtgtgtttcttgaccccatcattgtctagagactggaccacatgggtcatggatgcagtcaggttacaaagagttagaaacagagatgcagggaaagacaagcttagagagaaacagcatctgtaagtgaaaatcatggggagacagagacagaaacaaggaagaaacagtcccctcccaccccaacactcacttcatcctggtcccgcatagcattgagctgctccagcttcttggcccagtagcgagcctcctcttcaggaatgtctgcaagcagagccctgtctgtgagcctggaagaccctccctgccgctcagcctccatcctccaggcctactgagctccacccgggccctggcttctggggtctttggcaaagcctcagaagtaggggtgggttggtctgcggtctcaggagggtggatggagatgaaggggaggtaccgtggtgcctctgacgcccctcttcccagagctgaatggagaatagttggaggatgacaggagatggttcctagcctttacgagggtggggaagccattgtttttatttaattttttaatttttaaattgttttttgagacggagtctcactctgttgcccaggctggagtgaagtggtacaatctcagttcactgcaacctccacctcctgggttcaagcgattctcctgcctcagcctcccgagtagctgggattacaggtgtgcaccaccatgcccagttaatttttttgtattttgagtagagacagggtttctccatgttggccaggctgctctcaaactcctgacatcaggtgatccatctgcctcggcctctcaaagtgctgggattataggcatgagccaccacgcccagcccattgtttttatttttatttttttagagacagggtctcgctctgtcacccaggctggagtgcagtggcacaatcacaactcactgaagcctcaaactcctgggcttgagccatcctcttgcctcagcctcccaaatagttgggactacagaaacccagcaccatgcctggtgaatttttaactttttcatagagatgggatctcactagatggcccaggctggtctcaaactcctggcctcaaatgatcctccccccttggcctcccaaagtgctgggattacagacatgagaagctatgcctggccagccatgggttcttagaagaatgaggtggagagactcaaggtgcttccaggaaaggaagaggggactatctgttctcagcctctgtctacatgtctctctctgtctctctttgtctctctgtctctgtctgtctctcctcctatccccagttcactgttgcagtctcaggcatcaccaaggaacagccaggatagctcaaccctgaacgccctcggtcgtgaagcacttgcagctcactgggaagctacggggcccaggtcatggcccgcacccagcaggttcacatccctgttctctgcaacccaagaaactctctctcctccggggcgaaggaccctcattctcagcctgaagggtcagctagacctacccaggcctgttcactctcctggaatagctgagtgagtccacaactggggctggggctgggtgaaggtcccgggcccctgtactcacctaagggtagctcaaagcgcgtgtccaggaggatgcggtggaaggtggggtccttggtgccacagatctcactgtctgccatgatgacctgggagtccagcgtcagccactctccagggccctcctgggggttgggggaggaggtgtgtgggtcaggaatctgctggtcactagtccccagggcccctactctcgcatgagacatccccctcacccctaccccaaaaccaaagtcatgtcccctctctatctttccttccgtccttccttccttcccttccttccttccctccctccctccctgcttccttcctttctttctttcccttcctcccttccttcctttattcctttcttttccttccttcctttctctctcttttttcttttcttttcttttttttttttttttgagacagagtctcgctctgtcgcccaggctggagtgcagtggcgcgatctcggctcactgcaagctctgcctcctgggttcacgccattctcctgcctcagcttcccgagtagctgggactacaggcacccgccaccacgcctggctgattttttgtatatttagtagagacggggtttcaccgtgttagccaggatggtctcaatctcctgacctcgtgatccacccatctcggcctcccaaagtgctgggattacaggcatgagccaccatgcccggcctaatttaatttttttgagacagagtctctctatcacccaggctggagtgcagtggcgtgatctcagctcactgcaacctccgcttcccaggctcaagtgattctcctaactcagcctcctgagctgctgggattacaggtacgtgccagcactcctggctaattttttgtatttttgagtagagacggggtttcaccatgttgcccaggctggtctgctgagctcaggcaatccacctgcctcagcctcccaaagtgctgggattacaggtgtgagccaccatgcccagccaaggcttccttttagactcgcttacctagattgttgcaaccatttcgtccctctgcattcattcattcaaaaacaaacactcactggccaggtgcggtgactcacacctgtaatcccagcactttgcgaggccaaggtgggcggatcacttgaggtcaggagttcaagaccagcctggccaacatggcgaaaccccatctctactaaaaatgcaaaaattagttgggtgtggtggcaggcccctgtaatcccagctactcaggaggttgaggcaggagaatcacttaagccagggaggcagaggttgcagtgagccaagattgtgccattgcactccagcctgggtgacagagtgagactccatctcacagtaaaataaaataaaataaaataaaataaaataaaataaaataaaataaaataaaatgacaaaaacgaacaaacaaaaaacagtccccagtccctcctctatgcctggttcatattgggtgatgccagggtccccaagaggcccagccatcatcaccctggctcctgagagcccatagcccttggaaacagggctggacacaggcacccccagccccatgaggtcatagcccagagggaggaaggagggctaaaggatctagagagaagtcagagagggcttcctggaggtgggcacatgggaatttagaaggtgatggaaaggaggacacttgaagctcagggaacacactatgcaaaggttcagagggtggaatctgggaggggtagaggttagagtgtggggggagatgaggctagtgggcaggtgccatctgaagggcctcccaaggcagatggacaggggaggacagatcagagctccagctaataaggccttcctggggtcagcatggagaggttgagacttgaggttaggaggccagggattgggctgtggggacagatgaatagacatgaccacggcctggcatggtggctcgcacctgtaataccagcactttgggaggctgaggtgggtggattgcttgagcccaggagttcgaaaccagcctgggcaacatggcaaaaccctgtctctattaaaaatacaaaaaaaataaggggggcctggtggcatgcacctgcagtcccagctactcaggaggctgaggtgggaggatcacttgagcctgggaagtcgaggctgcagtgggccatgatcatgccaatgcactccagcctgggcaacagagtgagaccctgtctcaaaaataaataattaaataaaaaatagacatcactactacctgctgacaatgatgcacaggctgaggggccagggttgttacctagcaccttcttatgagttggtgtaagcttcctgctgctgcccatctgggacacaaaatgctaattgcctatattatcccttttctccttccaaggtaatacatttttagctgtgcctagggaagcacagcccaggactacattttccagcctaggactacatttcccagaatcccttgcagcaaggtgttggccacatgtctaagttctggccaatgagatgtgcatgaaccacccccctcccccaccaccagcacctttcggtggttggaatgaagatgcaatggtgagcctaaagcagccatttggggccacaaggtggaagccacatggagagagaggcagagcaagatggaaggtgtataggctctagtgactttggaaggttcgtggcaatcccaagtgtctacattgatgttgtcaggggataggagataaatgcccatcttgtttagtccactggtctctgggcttctgcaaggcactcctccttcttcaccctcaggccacccgccactcacctcattggactggcggatggtcctcagtgggatccacacagtgcccaccattgtgtcccagatgagacccttattccacacctccaccgtcagtcccaaatccagacggttaatctcgctgcagaaaaaggagagggggcgtcgagggagcaggagggaggaaacgggggcccagggagtttagttgattcgcctgagaacacacagcatactgcaattcaaacctaggcctgggagtgtcctaggtggtagggtaacatggtggttctcattttatagaggggaaactgaggccagtgggggaagttaagagctcggggtatcacaaaagaaccaggattcaaagccgggaaggatggcgtggggacagatgttacacatcgcctgcaccttcatctttctgagcccttccttgggccctccaacactgaccatgctgggtaagtgaggaagaggctcaaataccctccatagctccctttacctacaggataaggacattcgggtcacctctgtccttcccagtgtcatccccatctaatgatgtgaggacacgatcccacctcaaagcactttccctgcaggcctcgccctagacatatgtgaattcgggggagcaggaaacttggtgaaatgtgagattcactgaatttacagtttaccaaagatttatcttaagaaatatatttttaaaatatggccaaccacggtggctcacgcctgtaatcccagcactttgggaggccgagatgggcggatcacctgaggttgggaatttaagaccagcctgaccaacatggagaaaccccatctccactaaaaatacaaaattagccgggcgtggtggtgcatgtctgtaattccagctactcgggaggctgaggcaggagaattgcttgaacccaggaggcggaggttgcggtgagccgagatcacgccattgcactccagcctgggcaacaaaagcaaaactcagtctcaaaaaaaaaaaaaaaagtatatatatatctgatatatatatctgttggctgggattggtggctcctggctcatgcctataatcccagcactttgggaggccgaggcgggtggatcacctgaggttaaaagttcaagaccagcctggccaacatggtgaaacccggtctttactaaatacacaaaaattagccgggcatggtggcacgcacatgtagtcccagctactcgggaggctaaggcaggagaatagcttgaacccaggaggcagaggttgcagtgagccgagattgcaccactacactccagcctgggccacagagtgaggctctgtctcaaaacaaaacaaaaaaaaaaggaaaaaaattccattggccaggcatggtggctcacatctataatcccagcaccttgggaggctgaggtgggcggatcacctgagtccaggagtttgagactagcctggccaccatagtgaaacaccatctctacttaaaacacaaaaattagccgggtgtggtggcacacgcttgtaatcccagctagttgggaggctgaggcaggaggatcacttgaacctgggaggtggaggttgaagtgagccgagattatgccactgtactccagcctgggcaacagagtgaggctctgcctcaaaacaaacaaacaaacaaacaaaattggtggcaaggcctgggaaggcatgatgccctgaaattgtagcttggaggtagtggtcagggagggcttcactgaggaggtgacacaagctgagacctgaaggagaagagccagctggggacaggagagcaagtgcaagggccctggggcaagaacaagctgggaagtgttggagaaaggggcagaggtgggtgtggctggggcaggtgagggagatagagcgagaacctggtgggaatcacggggaaggctgtgggttttattgtgaggtcgatgagccacggacaagtttggaacatgggagcgacaggatgtgatttgcagttttaaaaatatccccctggctgcctggaggagaacagattgtaggaggtggatggcacaggaggccagggcggaggctggcgggcagcagggacttggctggtggctgcggagaccaagggaagtgattggattggggatgtgttttggaggtgaaggtgataaggtggacaggggaagagggaggacagaggggagtcacccgggattccccagtgtccagctctgccctgaggggccagcgaggtgctgggctatgccagggagtgaggtcatgccagacgctgcagactcacaacatgaaatcctgctcccagctgggctggctgccccgcaccgcgatggtcgtgctcttgacattctgcactttcagggtcacgtacgtgttgaatttctctgtggcagtgagagtaggggtcagcgctggggctcagggactctccaatgccccttcccaagctctagaccatctgctgtgatcccctcaggaatttctgggccactcaccccctaacccacaaccccaccctcagggcacaagggaggggcctcagtgtggggagacgtggaattttgggatacttcatccagctgcttcgaaatgaccatgccattggttttcagctaaaaagactgaggtcccagaaaaggggaacaaaattgactgtaagaaaccccctttgcaggctgggtgcagtggctcgcgcctataatgccagcactttgggaggtcaaggggggaggattgcttgagcccagcagttcaagaccagcctgggcaacttggcaaaaccctatctctactaaaaaatacaaaaaaataattagctgggtgcagtggtgcacgcctgtggtcccagctacttggaaggctgaggtgggaggattgcttgagcctgggaggttgaggctgtagtaaaacatgattgcaccacggcactccagcctcaaaaaataaaaattttaaataaaaataataataataaaaaggcagggcacggtagctcacgcctgcaatcctagcactttgggaggccgaggcgggcggatcatttaaggtcagaagtttgagaccagcctggccaacatggcgaaaccccatctctactaaaaataaaaaaattagccgggcgtggtagagggcgcctgtaatcccagctacttgggaggctgaggcaggagaattgcttgaacccagaggcagaggttgcagtgagccgagatcacgccactgcactccagcctgggcaacagaaggagactctgtctcaaaaaaaaaaaaaaaagaagaagaagaaaagaaagaaactcctttcgcctctctgagcctcatttttcccacctgtagccccatctaagagtccccattctacctcttaggaccctgggaagagccactggctcagggcaagccccaccccttacagactctccaaggatggctggggagacccggggacccccatacaaactgcagggaccccaggccaatggctgcccctccccctatttaatcttctgacccctctcctgatgctcagaagacataaagcccaactctaagtctgggctgggaccccctcccagtctctccaagagacagacagacagacagacaacacgggacaggacagcaagagaagccacttaccttgggcaccatcaaacttggcttttttgactgtggagagagacagagatagggaagggaggtggggagagatgtggggaggaggaggcagagatacggagagattcagagacacaccaagatggagacataaggagagagacacagaggagagacaggcaaagataaaaagcaaaagagacagatgttaaaaaagaaagatagaagcaatgtcagagacagagacaaggggaggaggagaggtaggaaagaggaggcagggatgagagggagagagagaagccatcagacagatgagcacaggcaaccctagaatggaaggaaatttggaccctgagagcattccctgcccctccctctccctgcatcccctgtccccatcaaactccccaagctcccaactagctgtgcctttacccacaattgaacaagattagaaagaaagagctgggcagatggtgggagaggcctcctacaagaagccctccaggattgccccagaagaagaggggaagttgaggaggtggagaagaagaaggcgaggataaagacaatctctgatgactccaccagccccgacaggtcagcaagacctctcccttgattgtccagctcagtctgcaatgtcaaatgctcccagggtttggggaagcctcaaagaaggctgggtgagttgggacaaagcaacccagagagctggctctcaaaatgcatgtggagggcgaggcacggtggctcacacctataaccccagcactttaggtggctgaagcaggtggatcacctgaggtcaggagttcaagaccagcctggccaacatggtgaatccttgtctctactaaaaatacaaaaatttgccaggtgtggtggcaggcgcctatagtctcagctacttgggaggctgaggtaggagaatcacttgaacccaggaggcagagattgcagtgagccaagatcatgccactgcactccagcctgggcagcagagtgagattcttgtctcaacaacaaccaaaagtaatgtacagggagacacttgggtcctggctggagggttgacagagattgtccagccccacctgcttgtgggaggtgtaacctgaatatatgtcaggcaccccactgaggtccagtcttctcacatttcacataatctcacagccccaagagattcaaagccatgtcgccccctcctggctcttctcaacaggtattcagtttccattgccaacacctctcacaccttgcttttgtcccccacatctttttcctccattaattctctactcccacccccaatcttctcccacactgagctcttccctccctttcctttctttcttttctttttttttttctttttttttttagggacggagtcttgctctattgcccaggctggagtgcagtggtgccatctcagctcaccgcaacttctacctcccagattcaagcaattctcctgcctcagcttcccaagtagctgggactacaggcgtgcgccaccatgcccagctaatttttgtattttttagtagagacagggtttcagtatatgtcggccaggctggtctcaaactcctgatctcaggtgatccatccgccttggcctcccaaggtgctgggatgacaggtgtgagctgccacaccggccccttttctttcctccctcttttcttctccccttttccttttcaaattagtgtctttgtttgtgtaggcaatgcatgcacatgttgtaaaatccaaaacaaccaaaagatgaggcactgagaataaagctctttccatcccagcccttcatctccctcccaaatgcaatcaacgttggcagttccttgttccactggagatggtccatgcgtcggcaaccatacccacgttcgttttgcttgatttccaagacaaatggtagcattcgacacccactgttctaatccttcatgttttttcagtatgtcttgaagagcgtgtactagcgagttgaaggataaattcctagaaacagaattgtgtttctatgggcagatgtcacagcctcccatcccgggtttgtatctctgtcctcatcgcttgaatttctgtctcacaaaaggcacctgagtggagccagtgaagagagaattcccgtgaagagcgggggaagtgcgatggccctaaacacatgtcagtaaagactgttcctggccaggcgcggtggctcatgcctgtaatcccagcactttgggaggccgaggcaggtggatcacttgacgtcaggagttcgagaccagcctgaacaacatggggaaacctcgtctctcctaaaataacaaaaattagccgggtgtggtggcacgcacctctaatcccagctactcgggaggctgaggcaggagaatccctttaacctggaaggcagaggttgcagtgagctgagattgtgccactgcactgcagcccttgggtgggccttgagagaagtgaatgctggtttgagccaggttcagattcctgagctgtgtgaccctgggcaagtgaacccctctctctgggccttcatctctgcttccatctctgtcttttttttttctaggtctggtttgttcgctcacatcctcagccccacccagcccccagggagcgcacccacccagcacctcacccctgggactgaaagaggctcaggaacactcaggaatgtgcccagcaggagctttgggcctggctcctggaggaggtccagcctgcaggcgtggggactctctgtgaagggggtgggcaggggaaggggcaagaggtagaatgtgacgggatcgggggtggaggggatgctgacagaggctgagaaaggcacccacagctggagggactcatacagggagaggaagggagaggagagaggaagaaatgatgggcatgaaagcaagagaggagagtctggacagatggagagaaatagagagacacaaggagacagcgagagtaccaggcatagaggcacatgcctgtaatcccagctactaggaaggctaaggcaggaggatcccttgagcccaggagttcaagaccagcctgggcaatgtagtaagatcccatgtctaaaaataataatttaaaagggagagaggctgggcgtggtagcccacatctgtaatcccagcactttgaggccgaggcaggtggatcacatgaggtcaggagttcgagaccagcctgggcaacatggtaaaaccccatctctattaaaaatacaaaaattagccgggcatgatggtgcacgcctgtagtcccagctactcgggaggctgaggcaggagaatcgcttgaacccaggaggcggaggttgcagtgagccaagatcacgccattgcactccagcctgggcgacagagcaagactctgtctcaaaaaatatataataataataataataataaaagagagagggggaaagatttccactagggagggcaggcaggtggaggagacactggggagaggagaggcagttgggggagaaaagtagggatgcatatgggggtgggaaagtgacaggctctggggggtgatacaaggggctcactggggtctagactgggctgggctcacttgaagctcctccaactgtgccctgttttataaaccatggatttaggctcagcggggagcccagtagctccttgatctgttctctctctctctttcccaatccctgtctctcatctccctcctccccgttctatttctctccactctggtcgtcttcttttggtctctgttctctccttctctctctcactgtctctgcccttcttgtgcccctcccttggtcagtccggctcctcttccctaagcctcagctccttcctgcagcctctcttggctagaggggaatggtctccgttggggtcctcaggcagtgggggaccggctggagggctgtaccctctgatagctgaagccaggctcctgcacttagctccctgccgaggtccaggttgaggacatccatgatttttcatcactggggctcccagtgggagaggggtctcagagggaaaaggggacaggaaagggggccgagagtggcgagggggttctcaggagggaagggtgttcgcggtgagggaggggattcgggaagggggatgggcgcagaggggagggtggtatcgggggagaggcttggaggaggaagggggctcagagaaggaacccagtctctctccctgtcttccccggtcagtaaatggtccctgagtcaccgtcttcgtcgtcacatcccgccacctccccgcctgcgccgggttgctgtatcagggtcagcggggcggaagcgccacccttccccagcgggcttcgggtcacacgcatgaggctatttatagcgtgggcgcgcggagggcgtgggaggcgcgccggcggacaggggggcggggatgaggggggtgcccactgctgtccccagcgacgagcgggtgaagacaccgcgtcatgcggcctcaaaggtctttggggcccccagaagcgctgactgatgaatgtagtggccgtacccggggaggctgaggcaggagttcaggctgcgggacacccctgcagcctggcttcgcgcctccgtttctgcatctggaaaatggggagacggagtggctgatctcccttccctctcctttctcctcctcttcttccctcctcttcctccctcaccccttctgcagaatgattatagtgtcatttatactattattattattactgatatctttactgtttttattatttggttgtgttctaaaggtgtccctggcctggattctaggatttgaataccctggattcttttctttttctttcttttctcttcttcttcttctttttttttcttttcttttctttttttttttttttttttttttgacagggtctctctctgttgcccaggctccaggctggagggcagtggtgtgatcatggctcactgcagcctcgatctcccaggttcaagcgatcctccccactcagcctctcgagtagctgagactgcaggtgcgcatcaccatgcttggctattcctttttttttttttttttttttgtagagatggggtcttgctatgttgctatggctggcttcaaggctcaagccatcccctcggcctcccaaagtgttggaattacaggcgtgaaccacatggctgactgaccctggattctaattaggggggactgcagtcttggggcactggctccctgacctgccacgtgggatggggtggggagacaggaggtggagatccagccgtctagggcttctgaaagcccacccgccccaggattagcttgggggaagggaggaagcatagagaatccagaaatagattataggagatttgatcgttttgtgtgtgatgttggtggagggcatttcagcgggagatggatgggctttaggataaaagacctcagctgtgctggtttcgcatctgggagacactaaatgaggacccttatcctccgttgacacaaatagaccagagccagactgagccttcagtgtaaaaaacaccaagaacctggagttccagagagcttcgggaataagggatttgtgtgtgtgttgtttaccatgaaccacttagaagtaggcctagcctatagtaggtgctcattaaatagtaattcacggaaggaatgacgtcacctcctccattaatcctgggaggctgagctaagagctgtcccccagaggcgcgggcaggcgctgtccacggtgctgaatgctcggtcccacccgtgtaccctcaacgaactaggctccctcctggagtggccctgggggacccctcttggagcgctcctcgggccccagaatgcagtggactctcagaaatgtcctgcactcagaaccgccttccagaaagcttttagtctccattaataaaaacatcatcattgatttttttttttttttttttttgacggagtctcactctgtagcccaagctggagtgcagtggcgcgacctcggctcactgcaacctccgccttcggggcttaagcgattctcgtgcctcagccccctgagtagctgggactacaggcgcgcgccaccatacccagctaatttttttgtattttagtaaagacagggtttcaccatgttgcccagggtggtcttgaactcctgagctcaggagatctgcccgcctaggcctcccaaagtgctgggattacaggcgtgagccaccggggccggcccatcattgatttttcatgtcttttgctcacgattattgggccttcccgtaggccaggagtcatgccaggggctctgcaagcctcattagagagttctggcaaacgtagatggtggatgctactcctgtgcccattccacagatgagcacaccaaggaatgcagaggatgtgagacttgccaggaagtggtggacttagcaattcacactcaggcctgctggacccaggatgcccttattggcaccttgcagaagaggtccattgtatgtggaagaaaagtgaggccaggttagggaaagggttaggctgcagccctgaagatgcaactctggagggcatcccatgagaacggtaggagctaagacctagatgcagctcctcctagctggagggtatcagggactgagtagccaggaacggagggatgtgtgaaggcttcttaggcaaggagcaggggaatagccccgatgaatggagagattgtgacatgtctgtttactagatgcatgagagaagaaagcaatcctggctgggcacagtggctcatgcctgtaatcccagcactttgggaggccaaagcaggtagatcacttggtggtcaggagttcgaggccagcctggctagcatggtgaaaccccatctccactaaaaatacaaaaaattagctgggcatgatggtgtgcatctgtaatctcagctactcaggaggctgaggcaggagaattgcttgaacccgggaggaggaggttacagtgaactgaaattgtgccactgcactccagcttgggcaacagagccagactctgtctccaataaataaataaatagaaagaagaaggcaatcccagggcagaacatcactccacagaagggacttggctgtctccgaggtcctggggtctgagagaaggctcaaacttctgccaaccccagtaggctctagagtcagtcagctccacctctggctctgttccaccaggcaagttgttaaagctccctgagcctcagttttcctcatctgtacaatggggctactgtaagagttaaagagggcatgggcataaaaatccttaacatcatgcctatgaaatgctgggctgggcacggtggctcgagcctgtaatctcagtacattgggaggccgaggcaagaggatcacttgaagtcaggagttcaagaccagcctggccactagagatgtatttgtatttttagtagagatgagaaaccccatctctactaaaaatacaaaaactagctaggtgtggtagcacgtgcctgtaatcccagctactcgggaggctgaggcaggaaaatcgcttgaacttggaaggtggaggtttcagtgaaccgagatcacaccactacactgcagtccgggtgacagagtgagaccgtgtctcaaaaaacaaacaaacaaacaaaaaagctggataaatggggtttgttgttgatattattgtaagttgtgaagcaaacccaccctcacctaaattcactgatttgttcatgtcatttattcataacatgtttatagagcctttaaaacatcagttgggcgtggtggctcacacctgtaatcctagcactttgggaggctgaggagggtgaatcacttgagcccaggagttcaagaccagcctgggcagcagggcaaaaccctgcttctgcaaaaaattaaaaagaaaaaagtcagccgggtgtggtggtgcatgcctatactcccagctacttgggaggctgaggcaggaggatcacttgagccctggaggtcaaggctgcagcaagctgagatcatgccactgcactgcagcctgagtaacaggctttgagtgagactctgtctcaaaacaaaacaaaacatcaagtggcctgtgcaaaatgctgtgaggcacataggaagatctggaagtaacccttcacaccaccatgcttttgctcatgctgttccctccacccagagcaccatctccctcctgctcatctccccctcatcacatcttctgagactcaagtaaatggtggtggtggaatcagggtaggcttcccagaggaagagagccctggataccccactcctcagctcccttagccctccctcatctctttcattctaaccccatgggacgtgcaggagtgatggctaggaatagggctgggtcccagagccaggaacagtgcctggtatacagtaggtgctcaattaatgcttgttgcataaataaaataagtgacttcatgaaggaaccaggtggcatttaccattcacagcctcaggatcctgccaagacctagtcagtggattacgatgttgggaagcagcggggcaccacatgaataaataaatgaagcgggcagagataaggcccatacaccatacagggtggtctgctatgtgttggtgctgggtgtatacacaagagcttgcatttgcctgtacttgcttgggtatttgcagcagtagttggctcatcttaccagggcaggcaggtgcctgcctctacatggatatgagtgtgcatgtgtgcagagtatgtgcaccatttaagtgcaggtgggagtctgcacatgtgtgtctaggagtggggtgtcactacatcagagacacactggtgtgtgtgagcttgtgggtgatatgttaggtggaaaacacacatattgatgtttgcatgtgtacatggatgcagttctgtggcagctgtatttgtttatctgcatacatgtatgcacttgtgtgcaatgaaatactcaaatgtgtatttacttgtatgcatcatcatccacttgttgaaaggggctgctttgaatgtccaggcaagtgttgtcatgtgcatacacacatggctttgacatgtgcttatatgaatatatatgtgcttcatggggttggggaccttaacagatatgtatgggtacatgtctgagtgttaggacatgagtgaatctttttttttgagacagagtctcactgtgttgcccaggctggagtacagtggcaggatctcagctcactgcaacctccacctcccctattcaagtgattctccttcctcagcctcccgagtagctgagactacaggtgcgcgccaccacacctggctaattttttttattttttagcagtgacaaagtttcaccatgttggccaggctggtcttgaactcctgacctcaagtgatctgcccaccttggcctcccaaagtcaaagtgatgagattacaggcctgagccaccgcgctcggctggacatgggtggatctttatgtgacatgtatattgtgagcattcatcagacacgtggatacatctatatgcgtgctggcagacacacacactcacacgtgtgttgctgggactatatctgtagcggcagactgtgtcctatatacacgtgtatgcttgtgttcacacaggcatttgagtacacacgtgtgcctacggaatgtgccttcccaggcacatggtctgcgtagagccttcatacatcctaagcatttgtgtccacacaggaacaagtctgggtatgaatgtgtgtagggattggcaaacgcctgtgggtccccggtggaggggaggggggacaggtatttcctcagctgagctcaggcaacacggcaacccatctcagcctagcttcactcctgccaagcccaccccaacatctctcgtgctcagccatcccagcccctcccctctctgggcaccatcccacctctccctgggagactggcctcacccagcacttctccctctccccacccctccctgcctcctactcctcctcactccaacctcacacctccctttacacctgagggccttacctcccacccctgtcaacctcttccccagccttgcccctcccagcgattcctctccactcagccgggcccctccctgtaaagtccacagaatccagcacagtcctcccccaacgtctctgtttctggaagcctcatccctcttgcctcctgctgcccccccttaatgccacccccgcagccgagcctcctgtttgcgtcagagttaagggtgagatccccgcccccccccccccccccccactccactaggcaaaccttccagagaagcccaacttggaggatgtgaggcggggtggggcgggatgctggggggagaagagagaggatagaggagtcagccaagaacacccacgtcggaacctcctccagtgccacctttaagagcccggctacttagagcagggggagaggtcagtagggggtctggacattcaagttctcctcccattccgtcctcaggcctaggcggtgggggtcgcctaggggtctccttcacttccctactcccctaactccataggcctggaggctaggggatggaggagttgacctttgactctagggacccttcttccaccacccccagccccgtccagcagaaacgagcttagagaaagtaggcccctgtccctttaagaacacccgcgtccacgccggcccagcccggccggatttgcactcggaagctgccgcggcggggagcgggcgggcggggcagggtttgtgaatgaatcggccgagggggaggggagggaggaggaggggcggcgggggcggttcccggctccccggcctgcccaccctgtgtccaggcagcaggagttcagcacacgcacgcttcctgtcgcccgaggtctcccgaagcctgcagtctcaggcttggcagacacaccccttcccccaccccagccttcttgaaatgggtgggagtgacggggggaccccagtccttaagaaccaggggttcagagctctgtaggcgtggaacggcggtccacatccacccctgccgcccaaggtctcccagagtttgatttctcaaacgggagtgcccagaacgcctgggttcggttgggctggcttccccacgaccccagagccataaaggtgtggggtggggggtcatgcccctcccacgtctccctccctcctccaaccccaacgcagagcgtgggcctgggcgtgggcctctgtgcagatggcgttctggccccaaaatagctccccccccacctcacgtctccctccctccctctctccagtgcaaagtgggtgaggtgaggatgggccaggagggggaccaggagacattgctcttccaagaagtaggctccctgccgagaaggccctgaaacgtgtttgggagaaccggagggggcagggagcgggaagaccttctggacattcctccaaccccctcactcgggaggccaaagagttaactggaaaagcgcccccagacctccagtcacagccctctctggacgctgggaggggtctcctgtctccacactccccccactccagtcctctttacacctagggctgggagagtcctagaactcgtggatgccctgatggccaagcccctctacctatatcttacatccccacggcttggagaaccctcccaccgcactctccttcgaatttccagccgggtccgcgtccatgaggacccgtaacccagcccacaacaccagaccccttccaagcacccctgcaggcttcaatcaaactaccgagcccagactcttcctcactgaccctctaaaaacctggtctacacagacgccccagtctagatcgtttccgggtagaaccccggatacccgtccacgtccacacgggcctccgcgttcagccgcgtccacacgacccctccagcagcggccaccaggacccccgagagccctgccgcgtctacacggatcaccccctccggggcccagctgcgtcgacaagggctacccctctcaaaagtccagccacctggactcgggtcaccccccaggaaccccctgggagccgcatccacgcggaccccgaccccagcccgcgtccacacgggtcccccgacccccagcctcgcctcctacctccaacgcaaagcagagacatgtctccgagctcgcaggtgggccggaggcggccgggccggctctgtcgggtcgggctcagcggccgctgggctggggcatctcccggctgcagcccgcgcttggctcacgccggggcccggccgccaccggccatcttggttcagcaccgggggcgcggacagcgcctgacgtggcgctgatgcggggcgggcaggcggagcccagggacgcctgatggggcgggggcgctgcgggctgggggggcgttaaagggcctggctccgggaaggggcgcctcgccccacacctcctcgttgcagggggacaaggggcgacggcggcccccaagcaggtttcctcctgtgcagaccctcacctgcactgaaatggtgcacgtgcccccgccacccatgcatggacattcctgccctggtaacctgggcaaacgcctccctgcaatactcaagcaagtacaggcaaatgcaagctcttgtgtgtacgcccggcaccagcaccgggcagatggtcctgttctctgagtatctctcttcctctgtctctacgtctctgtctctctaactctactgcctggtctctttctctccctgggtctctgttcctctgactctgtccactgctctctcagtcatgtgtctcttagcctctctctgtaaagtctttttgcagctctactgcatcctgtctaggtctctctctatgtctctaagccatccagcccatgggtccttgcccacactctgaactccttttcatccatcaatgtcttgtctgaatatcctctcctccaggaaggcttccctgactgccccaagctgagcctttgtttctcctctctggactcccccagcccctatcccttcctctgattgggccctgacccgaacgaaactctgccactcctccccacttttcttttttttagatggagtctccctctgcagcccaggctggaatgcagtgacgcaatcttggctcactgcaacctctgcctcctgggatcaagagattctcctgcctcagcctccccgagtagctgggactacaggcgcatgccaccatgcccagctttttttttttattttattttttttatttttagtagagacgaggtttcaccatgttggccagcctggtcttgaacacttgacctcaggggatccgcccatctcggcctcccaaagtgctgggattcagacctgagccactgcgcctggccccctccccacatatcaaactgggcagctccatgtgggccccttgccctgcaacctgctcgctgtatcactggcacctaaactagcatgaaaggctgagccccacagggtctcctgcccccagcccacatgaaagagcttcataaatgcagaatgtgcatggagttgagtgaggccattgttcaaaaccaaactctgtctctcatcacaagcatggccttgggcaggtcttgtgacctcctcgtgcctcagtttccgcacctgtagaatgaatatgataacaagtcctgcctcacaaggttgctggaggtattacatgagttaacatgtgaaaccagttgtaatttttttttttttggaggtgtagtctcaatctgtggcccaggctggagtgcagtggcaccatctcagttcactgcaacctcaacctccaagtgatcttcctgcctcagcctcctgagtagctgggattacaggcgctcgccaccacatccagctaatttttttgtattttttgtagagatggggtttcaccatgttggccaggctggtctcaaactcctgacctcaagtgatccacccaccgtggcctcccaaaatgctgggattacacgaatgagccaccgcgcctggccccagttgtaatcttaatgcctaatagtaaccatgtttgtatctgtcactgctttaaatttttaaaaaaatcagcacagctaatttttgtattttttgtagagacagagtttcaccatgtcgcacaggctgtctcaaactcctgggctcaagtgatcctcccgtctcagcctcccaaaatgttgggattacaggctcatgagccaccatgcctggtcttaaatttttattaaacatcaatgagtagatgttttattaaacattgataatcaataaaacattgatgttttattaaacatcaatgagtagataaactatgaggagcaggcttggataaaaaaaattaccatcgaccgggctcggtggctcacgcctataataccagcactttgggaggctgaggcggggtgatcacaaggtcaggagatcgagaccatcctggctaacacggtaaaacccgtctctactaaaaatacaaaaaattagccgggcgtggtggcgggcgcctgtattcccagctactcaggaggctgaggcaggagaaaggcgtgaatccgggaggcggagcttgcagtgagccgagatcgggccactgtactccagcctgggtgacagagagagactccgtctcaaaaaaaaaaaaaaataccatcacaataaaagacccccatgtgcctctccccaatctcataatccttccctgcagatggaagaactatcacaaattttgtttttcattttcttccttttccttatagtttaccacatgctccttagcaaacaatacatggttacctcttgcatgtttctatttttttgagacaaggtctcattgtgtcacccaggctgtagtacagtggtgtgagctcctgagctcagacaatcctcctgtctcagcctcccaagtacctggaacaacaggcatgcacctccatgcctggctaattagagatgagggtctcactatgttgcccaggcttgtcttgaactctggggttcaaacaatctgcctgccttggactcccaaagtgctgaaattacaggcatgagccacctcatttgactttgttcacattctttactaatctgtttgtttgtttgttttttgaaacagagctgcactctgtcacccaggctggagtgcagtggcacaatctccgctcactgcaatctctgcctcccaggttcaagcgattctcctacctcagcctcccgagtagctgggattacaggcgcccatcaccttgcctggctttttttttttttttttttttttttttttttttgagacagagttttgctcttgttgcccaagctggagtgcaatggcacgatctcagctcaccgcaacctccgcctcccaggttcaagcaattctcctgcctcagcctcctgagtagctgggattacaggcatgtgccaccatgcccagctaatttttttgtaatttttagtagagacggggtttctccatgttggtcaggctggtctcgaactcctgacctcaggtgatctgcccatctcggcctcccaaaatgctgggattacaggcatgagccactatgcctggccatggaggttgcagtgataatttttgtatttttagtagagacagggtttcaccatgttggccaggctggtctcaaactcctgacctcaggtgatccacccacctcagcctcccaaagtgctgggattacaggtgtgagccacagcacctggactgctaatctgttttgtttgctcaatgtgattctgctgatattcatccatatcgctgcatgtggctgtaaggcttgcattttttactgctgcatagtattcctttgtatgaatcttctattggctattcatctgttctccaggtcatggacttttgggttgtttcaagctcaggtttattacaaaaaaaagtttttatgaccatcctcagacttcagacttgtgtgctggcacacatgagtaaggatggctgggtcagaaaatacatatatgtggccagacatggtggttcatgcctgtaatcccagcattttgggaggctgagatgggcagatcatgaggtcaagagatcgagaccatcctggccaacatggtgaaaccctgtctctactaaaaacacacacaaaaatagccaggcattatggcacacccctgtagtcccagctactcaggaggctgaggcaggagaattgcttgaatccaggaggcggaagttgcagtgagccgatatcacgccactgcactctagcctggaaacagagcaagactctgtctcaaaaaaaaaaaaaaaaaaggagggaaagaaagaaaagaaaatacatatatgctcagcttcacctgataatgtcatgttttttattgggagtctggcgattttcatcataccaacacagtataatcatcggttcctctatgttttgtttttgttttgttattggtttttgttttttcttgagatagtctcactctgaggcccaggctggagtgcaatggtgcaatcacagctcactgcagtctccacctcctgggctcaagcgatcctcctgtctcagcttcccaaggagctgggactacaagcctgtgctaccatgcctggctcattttattttttttagatggggtctccctatgttgcccaagctgttctcaaactcctgagctccagtgatcctcctgcctcggcctgccaaagtgctggaattccaggcatgaggtaccgtgcctggctctaagttcttgccaacactttgaattgtccaagttttttcactgggcctatgtggagggagggaaggagtgcctcatttgggttttggtttgctttctgattgctcttgacgttgaactttttatgtgattactggtttctttttatggtgaaatgcctgttcaagtcttttatccatttctttctctttttttttttttttttttttttgagactgaatctctctctatcatctaggcttgagtgcttctactaatgttgacatcttatatattgttacagggtacattttgagatggagtcttgctctgtcgcccaggctggagtgcagtgttgagatctcagctcactgtaacctgtctcgcagattcaagggattgtcctgcctcagcctcccgagtagctgggattacaggtacactctctatcatgcccggctaatttttgtattttttgtagagacagggtttcaccatgttggccaagctggtctccaactcctgacctcaagtgatccacccacctcggcctcccaaagtgctgggattacaggtgtgagccactgcactcggccttttgtccatttcttaaaatttcactgtctttttctattgatttatagttcctatgcatattaggaacaaatcctttgttagtttcatttgttgtaaaaatctccaattttgtagcttgtcttcactgtatttactgtgtcattttctgaacagaagctcttactttttcttttctttttttttgtttgtttgtttgttttaggcaggttctcactctgtcacccaggctggatgcagtggcatgatcacagctcactgcagcctccacctcctgggctcaagccatcctcccacctcagcctccctggtagctgggattacagtcacatgccaccacacccagctaatttttttttttttatcttttgtagagatggagtttcgccatgttgcccaggctgatctgggactactgggctcaagcaatcctcctgcctcagcctcccaaagtgctgggattataggcatgagccacttcactcgacctaaactttttatttgggaaacaaaaattttagacatacagaacagttgctgaggtatagagttgcattttacagtccatcctatatacccttcacccagcttctaataatgttgacatcttatatatggttacagggtacattctgagacggagtcttgctctgttacccaggctggagtgcagtggcgcgatcttggctcactgtaacctctgcctcccaggttcaagggattgtcctgcctcagcctcctgagtagctgggattacaggtatgctctctaccatgcccggctaatttttgtatttttagtagagacagcatttcaccatgttggccaggctggcctcgaactcccagcctcaggtgatctgcctgccttggcctcctaaagtgctgggattacaggtgtgagccaccacatccagcctacttatatatttttaatgcatttagtggtgggggtctcgctatgttgcccaggctggtctcaaactcctagtctcaagcaatcctcccaccacagcctctagcaaaatttaccatttcgaactggataattcagtggcatttcccacattgactgtgttgctatgttgttgtgcattaatcacctctgtccagttccagaacattttcattaccctgaaataaaaccccatcccgattagcaatcactccctttcccccacgcccagccccaggctaccattaacctgcttctcatctctgtggatttaagttattcaacttgctcagtcttttgcagtgtaggacaccatgtctaactcatagcatacttgcttgtttaagaaatcctttcccgggtgggtgcattggcttacacctataatcccagcactctgggaggccaaggcgggaggatcacttgaacccagaagttcaagaccagcccaggcgacatagggagaccccggctctacaaaacatacaaaaattcgccaggagaggtggtgcacacctgtagtcccagctacctgagaggctgaggtgggaggatcaccggagcctgggaggtcgagactgcagtctgcaatgagctgtgattgtgccactgcactcaagcctgggtgatagagtgagaccccgtttaaaaaaaaaaaaaaaaggaaagaaagaaagaaaaagaggccgggtgcggtggctcacgcctgtaatcccagcactttgggaggccgaggcgggtggctcacgaggtcaggagaacaagacaatcctggctaacacggtgaaacccgtctctactaaaaatacaaaaaattagccgggcgtggtggcaggcacctgtagtccaagctacttgggaggctgaggcaggagaatggcatgaacacgggaggcagagcttgcagtgagtggagatcatgctactgcactccagcctgggtgacagagcgagactccatctcaaattaaaaaaaaaaaaaaagagagagagagagaaagaaagagaaaaagaaaagaatagaagagaaggaagggagggagggaggaaggaaggaagggaaagaaagagagagagggagagagggaaagagagagagacagaaagagagacagaaagagaaaaaagagaaagaaagagaaagaaagaaaagaaggaaagagagaaaggaaaggaaagaaacaaagaaaaaggagggagggagggaaggaagggagggagggaggaaggaaggaaggaaggggaaagaaaggaaagaaatcattttctgccccagcgtcataaagatcttcccatacgtattctacattttttgagtcttgtcatttgcagtcatgtcttgacttctcttggaactgatttctgagtgtggagtaagataaagtccaatcgcatattttgtccatggggatgatctattgtcccaataccctgtaatgaaactcacaaagcaagttttcatgcatgtgtggatttaacagcaagcatagaccaaccagaagtcaagcagtgctgctggatgtctgcccacctggaagtctggtctaggatctctcttctgtcccagaggctgatctattcctggtagaagctttgtgctaatcgtttacatctgccaacaccagtcactcatcttgctctgcttcacaagcatctgacttattctttgctttcttctcagctttttgggttgcatggagaaactcagttgggacttagattggaattgcattgaatctataaaccaaatcaggagaatgagcatcttttgtgattgaatctttcaaagtgaacatacagtgaataattccatttatctatctttcagcaaagcttataactttgggatttttttctagatgctttgagtatttggtgctgtggataagtggcctatttatttgggggacagggtctgactctgtcaccctttctggagtgcagtggtgcaatcatacctcattatagccccaacctccctggctcaagtgatcctcttgcctcagccaccccagtagctgggactacaggtttatgtcaccattcttgactaattttttattttttgtagatacggggtctccctatgttgcccaggctggtcttgaacccctgggctcaagcgatcctcttgcctcatctcccaaagtgctgggattacagtcgtaagccactgtgaccagcatctatcaagctttctcaactttttgtaaacccaataattagatgtgcacattctttgggagtttattgcgtatgaggatgttatctgcaaataaagacactcttttttttttctttttcctttttttttttttttttgaggcagggtctcgctctgtcacccaggctggagtacagtggtgcgatcttggctcactgcaacctctgcctcctgggttcaagcaattcttgtgtctcagcctcccacatagctgggattaccctccccaggctcaggtgatcctcccaccttagcctcctgagtagccaggactacaggtacacaccaccatgcccagctaattttttttttttgagatggattctcactctgtcccccaggctggagtgcagtggcgcaatctcggctcattgcaacctccacctccctggttcaagcaattcccctgcctcagcctcccgagtagccgggattagagaagggacaagagtgagtccaggtcaggcaagccaccacgcccagctattttttgtatttttagtagagatggggtttcgtcacattggccaggctggtctcgaactcctggcctcaaggtctcgaacgccttggcctcccaaagtgctgagattacaggcgtgagccaccgtgccaggcctaaagacacccttaattcctcctttccactcctcagaactttcatttcttgttttctttagtaaaatgcgcagcaccatgttaacaggcattcctgccttgttccaattctgaaagagaatgtttcaacgttcatcattgatcatttggatccaattaatttttaagccctggtgcctcatttcattcccaccaacagcatagctcggctgattcgaaaggtattgatttgagctgtctcctcctccctccaattaattatgccatgctgcttctgtcttctcttgccctctcttctctgtggccccctctttttttttttagacacagttttcctcttgtcatccaggctggagtgcagtggcatcatctcagcctgcaacctccgcctcccaggttcaagcgattttcctgccttagcctcccaagtagctgggattacaggcatgagccaccacacctggctaattttgtatttttagtagagacggggtttcaccatcttggccaggctggtctcgaactcctgaccttacgtgatccacctgccttggcctcccaaagtgctgagattacaggcgtgagcctccacacccggccggccccctcttttatttatttatttatttacttatttttgagacagtctttgtcacccagactgaagtgcagtgacaagatctcggctcactgcaacctccatgtggccccctcttaacttcattcccctccaggtgcatctgcatttggagcctttgcaaaccctgtgtgactctctgtgtctttccatctctcttctcttggcttccaatttcatgctttctctccaccaccctaggaaacccacaaagaaaaataatggaaagagaagtgatgggagataatgtacaggctggtgaaaagtacaacccccccacctgcagagtgaggctaccactgccagcaaatgcagacacatcattcctgccttgctgagctccagggcttccccagggaccctgctcttatcaaaacctgcccacccccggtgccaaaagcagcgatgaaaacatctgggctttagatgagaagagtttcacggcacagcatctgtccagctcagcttttgaatggagaatgaatggtaagagctttttttcttctttttgtgagatggtgtctcactctgtcgcccaggctggagtgcagcggcacaatcacggctcactgcagcctcgacctccccaggctcaggtgatcctcccaccttagcctcctgagtagccaggactgcaggtacacaccaccatgcccagctaagtttttttttttttttttgaaatggagtctctgtcgcccgggctggaatgcaatggcgcaatctcggctcattgcaacctccacctctctggttcaagcaattcccctgcctcagcctcccgagtagctgggattacaggcgcacgccaccacacccagctaattttttttgcatttttagtagagaaggggtttcaccatgttggccaggctggtctcaaagtcctgacctcaggcaatgtgcccccttcggcctcccaaagtgctgggattacaggcatgagccaccgcgcccggccccagctaattttttgtacttttgtagagatgaggtttcatcgggtttcccagtctgctcttgaactcctgggctccagcaatcctcccaccttggcctcccaaagtgctgggattacaggcataaggtacccgcacccggctgggcagagctttttctagcagccccaatccaaggcaaacttgcttggtcttcagataaattcccagtccttacggggtgcatttgatgttcctggcactgtgcaaagctccatggagtagacggataccgatgagacgtcaatttgttcagccagcgtttgctggtgccatctggatgctgggaactaagcttgtcaccaggttctgccaggcgacattgtccctagcatgggaagtgggaatgaacaagcaggcagaggaagtcaaggacgattatgaggcgatgggaagggtctggtgacagagagggatggaaggggtgggggaatctgcttcccggaggaggcaacacgagagccaagatgtaaaagaggtggagccaggcagggagagagatgagggacaggcattcacaggacaggtgcaaaggccctgaggtgaggctgtgcctggtgtgttggagaagccgagaaggcttgtgtgaatgagtgagggggagagaggaaaagagagaaaggggaccggacatggtgactcacccctgtaatcccagcactttgggaggccaaggcgggcagataacctgaggtcaggagttcgagagcagcctgcccaacatggtgaaaccccgtctccactaaaaaattacaaaaattagacaggggtggtggtgcacgcctgtagtcccaggtactccagaagctgaggcaggagaatcacttgagcctgggaggcagaagttgcagtgaacagagattgtgccactgcactccagcctgggcaaaacagcgagactctgtttcaaaaaaaaaaaaaagaagaagaagaagaagaagaagaatagagagaaagggaactgcgggggaaggtcattcagggcctcagggcaggggatggagaaggctctggaatttactctgagatggacagacagagagatggagagagagtgactgagaaggaagaagagatgggggttcagctctgcaagacagggctgagactccagcccaagcctaagtggccactgaggtcttgttctaacccgtgtctccccacccccagacctctctctgatgcccccaactgcactggcagggagtgaccaccttgaacggaaaacggaatcagaacactgtgggcactccataaacatgagtgagtcagtacgtggtggagggagtgagggagggatggagtcgggggcggggaggggggcaggtcagcagggatacagactatgccaggcctcctgatcacaggaaagagtgtgggctatactatgagggtaatagggagccacgggagggctttgagcagaggaagggcgtgatctgctttatgatttttttttttttgagatggagtctcgctctgtcgcccaggctggagtgcagtggcgcgatctcggctcactgcaagctctgcctcccgggttcacgccattctcctgccttagcctcccaagtagctgggactataggtgcccaccaccacgcccagctaaatttttttgtatttttagtagagacggggtttcatatgttagctaggatggtctcgatctcctgacctcgtgatctgcccatcttggcctctcaaagtgctgggattacaggcgtgagccaccgctcccggcctgctttatgattttaagaatccatctggggctccctaggggagcaaggatggctgggggcaggagtgtaggtggcagggagccaggacagcatccacacaagatacagcaggccccttaggagctcagggaggctcagtttcattctggagccggagactgcaggacctgctgatgcactgaacatgcagggtaaggaaagagaagggacaagaatgagtccaggtcaggtgcagtggcttatgtctgtaatcccagcactttgggaggccgaggcgggaggattccttgagggagaccaggattttgagatcagcctgggcaacagagtgagaccccatctctacaaaaatttttaaatgagctgggcatggtggtgtgtgcctgtagtcccagctactcaggaggctgcagtgggaggactgcctgagccaaggagatggaggctgcagtgagctatgactgcactactgcactccagcctgggtctaggtgacagagtgagactctgtctcttttttagtttgtttgttttgttttgtttgtttgagacagagtctccctctgttgcccaggctggagtgcagtggcacaatctcggctcactgcaacctccgcctcctaggttcaagcgattcttgtacctcagcctcctgagtagctgggattacaggcacccgccaccacgccccactagttttttgtatttttagtagagacaggttttcaccatgttggccaggctggttttgaactcttgacctcaagtgatctgcctgcctcagcctcccaaggtgctaggattacaggcatgagctaccacgctcggctgaccctgtctcttaaaaaaataaaataaagagggccgggcgcggtggctcacgcttgtaatcccagcactttgggaggccgaggcaggtggatcacgaggtcaggagatcgagaccatcctggctaacacagtgaaaccccgtctctactaaaaatacaaacaattagccaggcatggtggcgggcgcctgtagtcccagctactcacgaggctgaggtgggaaaatggcatgagcctgggaggtggagcttgcagtgagccgagatggcgccactgcactccagcctgggcaacagagcaagactccatctcaaaaaaaataaaataaaataaaataaagagcgtatccaggaatcaggacccaggctactgtgtgatagtggaggcaccaacaggatggagaaggggcagatctcagggcgagtaactattctaagagccaggttttggccttgtgagtgtgaaatgcctgcaaggcactcagtggaaatatccaatgccattggatactgaggcctggagctctggggagatgcaggctggagacaccaatgggatagtcgacaacacgcaatgaggtgtggctatttggggcaagggcatagatacaaggtcaagggacaccctgctcttccaggactatcaaagccaagacatcacacccaggggtccaccctttacaactctgtccatgcccaacgccagtccctgttatcaggtcagcaggaatgctacctgcagggaacatggaattcagtgtccttgggcttaccataggtgctcctcttcttctctcaagtgcctatttatttatttatttatttatttatttatttattatttgagatggagtatcactctgtcactaggctggagtgcagtggcgcaatcttggctcactgcaacctctgcctcctgggttcaagcaattcccctgcctcagcctcccgagtagctgggactaccatgcccagctaatttttttttttttttttttgtattttagtagagatggggtttcaccgtgttggctaggatggtctcaatctcctgacctcgtgatccacccgcctcggcctcccaaagtgctgggattacagtcaagtgctcatttatagatggggagactgagttcctgagagtttggggcagcaggcagcggggcgggggagggggacaaggctgggacgtgaagtgggtctggagtaactctcagaataggccgtttctgcaatgcagacgtctgtgtaatcgttcattcattcaatgaacgtagtttggatccacacccttgcccatctcgcgctgatctgaaaggggacgtttctgttaggtgtggtggctcacgcctgtaatcccagcactttgggaggccaaggtggacggatcacctgaggtcaggagctgcagaccagtctggtcaacatggtgaaaccccgtctctactaaaaatacaaaaaaaaattagctaggcgtggtggcgcctgcctgtagtcagtcccagctacttgggaggctgaagcaggagaatcacttgaacctcaaaggcagaggctgcagtgagccgagatcacgccactgcacttcagcctgggtgcaacagagtgagaccccatctcaaaataataataatgatgatgataataatcataatgatgaaaggggcatttcaacgttcaccattgagcactcggatccaattaatttttaagctctggtgccccattttcttccagccaacagctcagctaattccaaagctattgatttgagccttctcatccctccacttaattatgccggtgctgtctgtatcttctcttgcccttttttctctgcggctccttctttgccaaggtcaagggtccagcgagcaaggaggatctcgctcagcacagggaattggaggaaggacattcctggccgagggcagggtgtgtgcaaaggctctgagattggacctcttattgaacttaattgtagctgtcaggctgcctggggcagagaaatcgatgagggcaaacttggcttatcgcctataaaatgaggataaaaaataatggtttctgccaggtgcggtggctcaagtctgtaatcccagcactttgggaggccaaggcgggcagatcacctgaggtcaggagttcaaaaccagcctggccaacatggtgaaaccctatctctactaaaagtttaaaaatcagctgggcgtggtggcgggcgcctgtaatcccagctactcgggaggctgaggcaggggaatcgcttgaacccaggagccagaggctgcagtgagccgagatcgcgccactgtactccagcctgggcaacagagtgaggctctgtctcaaaaacaacaacaataacaacgacaacagataataataataataattaataataatggtttcccagagaattaaatgggacaaaggcaacatcaatcttttgaaagttccaggccctgccctgcagggatgtagggtggaaataacactaggctgcaaaatgactggatgggcctggagtggttggatgggattggatggatcataaacaaaagtgattggattggtcaagaggaggagacggaggcaggaaataaaggcagacaaaggaacgtaataggttcagacccaatggaggcgaggttccggactcagagagggggcctcagcccaaagttcccagagtggccagctgggggcagcataagccattaggccatcccagggctgggagcagaggggaaccagggaccctctgtgaccctctgacggaggttaacttatttgacatgtgcctgcagtgtgccagacatggaacagaactctacaagcactcatttaatccccataatagagtttgcagatggggaaactgagaacaacaacgttaagttgctcacccaacgtcacacatcaggggagtggcagagcttggatttgaatttaggaagcccagctgaggcccttaacctctgcactctactggctctccttcccctaaatctcctaaaatgacagtttaaaactttttttaaggtggcgccgggtggggggtggggggcgggtgtgggtagggcacgggcatggtggctcatgcctgtaatcccagcactttggaaggccaaggcgggcagatcacttgaggtcaggagttcgagcccaacatggccaacatggtgaaaccccgtctctactaaaactacaaaaattagccgggtgtggtggcgcctgtagtcccagctactcgggaatctgaggcaggagaatcacttgaacctgggagacggaggttgcagtgagccgagatcacgccactgctctccagcctgggggacagagcgagactccgtcccccaccagaaaaagtcaggccagacgtggtagctcacacttgtaatcctagcactttgggatgcggaaagattgcttgggctcaggagttcaagaccagcctgggcaacaatagtgagacctcatctctactttatttattttatttatttatttattttctgagtcagagtctcgctctgtcacccaggctggagtgcaatggcacaacctttggctcactgcaacctctgcctcccaggttcaagtaattctcctgcctcagcctcccgagtagctgggattaaggcgcctgccactacgcccagctaatttttgtatttttggtagaaatggggtttcaccatattggccaggctggtctcgaactcctgacttcgtgatctgcctgcctcggcctcccaaagtgccgggattacaagcgtgagccaccacgccaggccctctactttaaatatgtatatattttttaagtcaaaaaaagcaagggctccctctcaacactctttctgtgtatctcacttatatgtcaactctggaagtgggtaccatcatttccattttacagatgaggaaactgaggcacaaaggagtgagctgagggccaggtggtgttatgtccaatgtaagtatcctaagagcatgtgaaatgaatttttggttgggcctggcttggaaaggggccagcacgaaccttgtcttctgcagcctccagtacctccgctgtcgccactggatccagccatgtccctagacccgccctagctcagggctacacccggactcactctgatcctccaagtcctgtttccccactctagactggctggagacctcgtggactcacaaccaacctaagaggttgaagtagggaggggagagaacactcaccgtggggcctctctttcctttgacccgtgagaaaaccatagaccagggatgccaaggcatttgcccaaaccacccaggtagtaggagacattgctggaccccaactcaggggtttgacttctcatatctataggaccaccataaggggactgtcaggcaggcctatctcagacccttggtgcccgcagctgaaaagcactctggggccctatgaaaatgctttaccgggcccggtggctcacgcctgtaatcccagcactttgggaggctgaggtaggcagctcacctgaggttaggaatttgaaaccagcctggccaccatggcaaaactccatctctactgaaaatacaaaaattagctgggcgtggtgacatgtacctgcaatcccagctactctggaggctgaggcaggagaatcgctagaacctgggaggcggaggttgcagtgagccgagatgacgccactgcactccagcctaggggatagagcgagactctgtttccaaaaaaagaaagaaaaaaagaaaaagagaaagaaagaaagaaaacgcttgagacccagaggcctgttcactttggctccaaaatgcaaaaagagaactgcaaagtccaaatgaatcgatgtttaattacattcagacacaggatgtcacctttatttgggttaaattcaatgcatctagaaacagccccggggttggttcactatccctaggaagacctcaggcagattgctaccagctgccagagagctacttgtagccagtagatttccaaaataaaatgataaattacaagaattaagtaataccaggtgagcgcttagcatatgcagggttacaccctcgggctgttttaactcttttaatccccacagcgaccctaccagttcaattgatggcgaaaccaaggcccagggaggtcgcacctctggggagagacagagctgagatttgaaccccaccaagcttggtgtctgtgcccttgactcctcaacctcacgttttacaatagggtcattagtagaaagggaggtgcggggacgttggtgaccgttagacttgctgcgggtctggatgtcgacacatggtgctgcttgggggcccagacgtgagcaggaattggaaactgggtctggacccaggttggtcacctccgccggggtaacaacactgcgcgccactttggtaggtcgcatccagctcgggatctggaccacgtggctgggatgcagcacagcccctgaccacgcccctgtgactgccgctgcctggaccacggctggcgaccaatgagaaggcgcacatcaaaagctccgcctacaaggccgttcttgcttgctgattggccatttcagcttcccatcacctctcccatcctctggcctacagcctccctggaatttttcccacacatctcccccgcaggcctttgcacacgctgttcccacagccagagataccttttcccctcttctccgggataaactgctttatccccccttctctgctaagatggcccctcctccaggaagccttccctgactcccaaaagtgagtggaggaggtcagctgctctcatcacattagttttcttatttgcctcccaagcaggctataagcttcttagaagccaggactgggtctcagatagctttgtctctccattgcctcacatagtaggtactcaagaaacgtatgtcaaatggaataattaatgaattaatctggtctcaaagattgaggagcactgagctagcagttaggagctaggaaatcctgaaggcagggctgggacacccgctgctggcttggcacagagtctaacacacagtgagtgctcaatacatgtgtgtggaatagaggagggaagggacatgtacatcatccctgaggacggcccacagtatgtgcttgatgttggctcactgcaccatttcatagtcccccacagccccagggacctaagtcagtcttatcacagttccagcctgtccagttggccacctctttccccatttgccccccatagccagccctgaggatggtggcgggaacatggtttcactctgtcgcccagagtggagtgcagtgctgtgatctcgggtcactgcaacctccacctccggggttcaagcaattctcatgcctcagcctcccaagtagttgagactacaggtgcgcaccaccacacctggctgatttttgtatttttagtagagacagcgtttctcatggtggccagattggtctcgaactcctgacctcaagtgatctgcctgcctcaacctcccaaagtgctgggattacaggagtgagccaccacacccagcccaagccatatatttcaaaacaaaaatattcagccgggcccggtggctcacacctgtagccctggcactttaggaggctgaggcagtggatcacaaggtcaggggtttgagaccagcctggccaacatagtgaaactccatctctactaaaaatacaaaaaatcagctgagtgtggtggtgggctcctgtaatcccagctatttgagaggctgaggcaggagaattgcttgaacctgggaggcagaggttgcagtgagccgagatcatgccactgcactccagcccgggtgacagtgcgagactccatctcaaagaaaaattatatttatatatataatatatataatatacaatatatagtatatatactatattatatattatatatagtatatacgatatagtatatatactatatatatcatatatactatatatagtatatatactatatatatcatatatactatatatagtatatatactatatactatatacactacagtatatattttatatactatatatactatagtatatattttatatagtatatatactatagtatatattttatatactatatatactatagtatatattttatacagtatataaaatatatactatataaattatatatactatatattgtatatattatatatacaatatataatatacgtatatataatatatagtatatagtatatataatatataaatatataatatatagtatatagtatatataatatataaatatataatatatagtatatagtatataaatatataatatatagtgtatatataatatataaaatatatactatataatatatattatataacatataaaatatatactatataatatatattatataacatataatacatattacatatataacatataatatattacattatgtataaatatataatatatattcaccatcaacttccactctgtgagaatcaattgcaaccacactctcttctcccaagagaccccctgtggtccccttcagagcccccagttcctctacccagggcacctcctgctttcaccccttcttccagcccattcatgatcacctggagagtctgtatctggttctgtctccctgagcctggaggatccttgaggccaggctggagtgagagtagcacagagggtttggctggtggtagtggggagggggattgttgagtaaatgaatgcatcatctgactggcaaactcccacacactcctcgaaaccccagttgcaaagtctcgtttttcaggataagttccctgtctccccagacatagtccccactttcccagctcctggcttcaccctctatcccagccctgacatcacagagatgggggacatctgtgtccagctgatcttcctccagacagatgtctccttgggcaccaggactgagaccgcttgggtatgccagcatcacccagcacaggaaagttgtcagggagtgtttattgaatgaatgaatgaatggatggatctcttgcagggcctacagtcagttcccctgggttcacatcccagtcattgcacaggtcactgaatctgtcccttgatgtctctgaccctcactttccaggcaactacatgtgtttactcgaagcccatgccccaggtggttgtgaagataaactaacacacaaatcttgtgactaaagggacgtcaggctccctggcatcccagagcaggagtgaatttcacccagaaccagcagctctgtcctccccctgccaccccacaggtgaatcgccccaccactagcatcagcacccagaacaggaatgttgtcaacacaagtgcttagtgaatgctgatacatagggttggcctgaggacgaggcaaggagacaagaaaggtggctattaaaaatctaacaacctgagcttggtacagtggctcatgcctgtaatcctagtgctttgggaggccaaggtgggaggattgcttgagcccaggagtttcagaccaacctgggcaacatagtgagaccctgtctctaccaaaaaaagaaaattttttttttcaaattagctgggcacgttgccatgcacctgtagtcccagctattcaggaggcagaggcaggaggatcacttgaacccaggagatcaaggatgcagtgagccatgatcatgctcctggactccagcctgggcaagagtgaggccttgcctcttataaaaataaaaaaaacgtgtctgggtgtggtggctcacacctgtaatcccagtgctttgggaggccgaggtgggccaatcacatgaggtcaggagttcgagaccagcctggccaacatggtaaaccccatctctacttataatacaaaaattcactgggcatggtggtgggcacctgtaatctcagttactcgggaggctgaggtgggagaatcgcttgaacctgggatgtggagattgtagtgagccgagatcatgccaccgcactccagcctgagcaacagggtgagactccgtctcaaaaaaaaaaaaaaaaaaatctagacccggtgtagtggcttacacctgtaatcctagccctttgggaagccgaggcaggtgaatcgcttgagctcaggagttcaagatgagcctaggcaacatggcgaaactccctctctactaaaaatatgaaaattagccaggtgtggtggcgtgcacctatagttccagctacttgagaggctgaagtgagaggattgcttgaacctggaggaagaggctgcagtgacctgagatgatgccactgcactccagcctgggtgacaaagtgagaccctgtctaaaagaaaaaaacaaaaaggccaggcgtggtggctcatgcctgtaatcccagcactttgggaggccaaagcgggccgatcacgaggtcaggagatcgacaccatcctggctaacatggtgaaaccccgtctttactgaaaatacaaaaaaaaaaaaaaaaaatagctgggcatggtggcgggcgcctgtaatcccagctacttgggaggctgaggcaggagaatggcgtgaacccggaaggcggagcttgcagtgagctgagatcacgccactgccctccagtctgggcaacagagcaagactccgtctccaaaaaaaaaaaaaaaaatctgacaactgaaatgttggtaggaaacagcctagatatttgttatccagccattccaaccctgggtactcaccggagagacagggggtatattcaccaaaagatacgtataaaaaggcttaaaacagcttttttctttaaagattttttgagacacaggatctcattatgttgcccaatctgttctcgaacttctggcctccagcaatcctcctgcctcggcctcccaaagtgctgagattacaggcgtgagcccccacgcctggcaatcaaaacaacaactttatccacaattgtcaacaccttgttgaggctcagaaaacaaacccctaaaatgaaggtctcagaaacaccagattttctctgaccttcttcgctgtctccgaggacccttcccctccgccagggttaccacagaaactagaattattttccccaaagtaggacagagaaaccagaactccttttccccaaagccagccataagccctaaaaatatgactaacttgccctctgcccttctgtgtaaaaactggccataaagaaattggccgggcgcatggctcacgcctgtaattccagcactttgggaggcagaggcagatggatcattttaggtcaggagttcgagaccagcctgaccaacatggtgaaaccccatctctactaaaaatacaaaaaaaaattacctgggcacagtggcatgcgcctgtaatcccagctaattgggaggctgaggcaggagaatcacttgaatctgggaggcagaggttgcagtgagccgagatcacaccactgcactccagcccgggagacaagagtgagactctgtcacaaaaaaaaaaaaaaaaaaaagagaaatgatctaacctaccttgtttgactgtacgccataagatccccattccagagagggttttgccctatacccagaaggaaagaacgctgctcagagaagccaagaagaatctagacagacaggccttgcagggtttccccactctgtctctgcacattgaaccttttttgccccatgtttgtttttgttttgttttgtgctttgttttttggagacagaatcttgctctgtcacccaggctggactgcagtggcgtgatctcagctcactgcaaactccttctcccgaattcaggtgattctcctgtgtcagccccccaagtagctgggattacaggcacccaccaccatgcccagctaatttttgtatttttagtacagatacggtttcaccatgttggccaggctggtcttgaactcctgaccacaggtgatcctcccgactcagcctcccaaagtgctgggattacaggcatgagccaccgtgcccggccagcccaatcttatttctacatcgctgctcatactttgttaaaccaaagcataaaaacggacaacttcccctgtgtcttgggggcttcattctgaaggctcccgcatatacaggttaaataaacttcaatgccttttttcctagtaatcaatcggccccatggcaatgacttttctgtgaaccttcagagggtcaaggaaaacttaacccctttatccctgcaacctggaaacaacccaaatgcccaccaataggtgaatggatagtgaaaaattggtacccagtggttatgtttttttttttttttttttttgaggcggagtctccctctgtctcccaggctggagtgcagtggcgtgatctcggctcactgcaagctccgcctcctgggttcacgccattctcctgcctcagcctcccaagtagctgagactacaggggaccgctaccatgcccggctaatttttgtatttttagttgagacggggtttcaccatgttagccgggatggtctcgatctcctgacctcatgatcctcccgcctcggcctcccaaagtgctgggattaacaggcgtgagccatggtgcccggccttttttttttttttttttttttttagataaagtcttactctgtcacccaggttggagtgcagtggcatgatctcaactcactgcaacctctgcctcctgggttcaagtgattctcctgcctcagtctcccaagtagccgggattacaggtgcccacgaccacacccggctaatttttgtatttgtagtagagatgaggtttccccatgttggccaggctggtctcgaactcctgacctcaagtgattggcctgccttggcttcccaaagtgttaggattacaggcatgagccaccacgccccgccatgattttttttttaataggaaaaccccaccaaagtgttggtgaggatgtgggcatattagaacctccatacgatgctggtgggagcgtaaaatagtgcagctattgtggaaaacagtctgggtctggcagttctacaaaaagctaaacacaggctgggtgctatggctcatacctataatcccaatactttgggaggccaaggtgggaggatcacttgaagcccggagttcaagagtagcctgggaagcataggaagtctttatctctaaaaacaacaacaacaaaaaaaataaaagttaaagggctgggcgcggtggctcatgcctgtaatcccagcacttggggaggctgaggtgggaggatcacctgaggttgggagttcaagaccagcctgaccaacatggtgaaacctcgtctctactaaaaatacaaaatattagccaggcgtggtggcacgcgcctgtagtcgcagctactcaggaggctgaggcaggagaattgcttgaacccgggaggcagaggttatagtgaaccgagatcgtgccactgcactccagcctgggtgacagagcaagactccatctcaaaaaaaaaaaaaaaaaaaaagaaaatgtatattcacacgaaaacttgtatacaaatgttcatagcaaaaaaaagccaaaaggtggaatcacaagagccaataattgtgatagccaaaaggtggaaacaacccaaatgtttattaacagatgaacggataaagaaatgtggcccggctgggcccggtggctcacgcctgtaatcccagcactttgggaggccaaggcgggcggatcacaaagtcaggagattgagaccctcctggctaacacagtgaaaccccgtctctactaaaaatacaaaaaaattagccgggcatggtggcgggtgcctgtagtcccagctacttgggaggctaaggcaggggaatggcgtgaacccgggaggcggagcttgcagtaagccgagatcacgccactgcactccagcctgggcgacagagcaagactccgtctcaaaaaaaaaacaaaaaaacccacaaaaaacaaaaaaagaaatgtggctcatccatatacaggaatatgattcagccataaaaagggaataacgtactgacacaagatacaacgtgggtgaagctggaaaacattatgctgtgtgaaggaagccagctgcaaaaggccacttactgcctgaaatgcctagagtgggcaaatccttaggacagaaagctgatttgtggttgtgagggactgcgggggggagtgcataatagggagttactgctgttgaggatagcatttattttcttttttttttttcaatttttatttaaaaaattataggctaggcacagtggctcacacctgtaatcccagcactttgggaggctgaggtgggtggatcacctgagatcaggagttcaagaccagcctggccaacatggcgaaaccctgtctctactaaaaataaaaaaaatagccaggcgtggtggtgcatgtctgtaatcccagctactcaggaggctgaggcaggagaattgcttgcacctgggaggcagaggttacagtgagctgagatggtgccactgcactgcagcctgggtgacaaagcaagactccttctcaaaaaaaaaaaaaaaaaaaattccgaatagagcgatagggtttccttatgctgtccagcctggtcttgaattcctgggctcaatggatcttcctgcctctgcctcccaaagtgctgggattacaggcatgagccaccatgcccgccctaggacagagtttctttttaagaggatgaaagtattccggaactagatattagcgagggtggcaggacgttgtaaatgcactaaatgtcactgatttgtacactgtaaaatggttaaaatggaggccgggtgcagtggctcatgcctgtaatcccagcactttgggagtctgaggcaggtggatcacctgagctcaggagtttgagaccagcctgggcaatacggcaaaatcccatctctacaaaacatacaaaaattagccagcagaggtggcctgcacctgttgtcccagctagtcaggaggctgaggtgggaggactgcttgagccctggaggcagaggttgtagtgagctgagattgtgccactgcactccagcctgggtaacctgaccctgtaatcccagcactttgggaggtcaaggtggatctcttaagcctaggagtttgagagcatcctgggcaacaaggagatgccatctctacaaaatatacaaaacattagccaggcatggcggcgcacacccgtagtcccagatacttgggaggctgaggtgggaggatctcttgagccctgaaggtcaaggttgcagtgagctgagatcaagccagtgcacctcagcctgggtgatagaatgagaccctgtcttaaaaaaaaaaaaaaaaaaaaaggccgggcacggtggctcatgcctgtaatcccagcactttgggaggccaaggctggcctgacaccgggagttcaagaccagcctggccaacatggtgaaatcccgtctctactaaaaacacaaaacttcctgggcatggtggcaggtgcctgtaatctcagctacttgggaggttggagcaggataatcacttgaacctgggaggcagaggttgtagtgagtcgagatcacaccactgtagatagagagagagagagagagagagagactcattctgtcaagcaggctgggttggagtgcagtggcgtgatctcagctcgctgcaatctccacagcccagactcaagtgatcctcccacctcagcctcctgaatagcccacaaccacacctggctaatttttgtatttttagtagagacggagtttcaccatgttggccgggctggtctcaaactcctgacctcaagtgatccgcctgtctcagcctcccaaaatattgggattacaggtgtgagctactacacccagcctgaccatgtctatattaaacctcaacaaaactgttaaaataagaaaataattgccaggagaagatgagaatatccagcagtcctgagggctcagggttccgttttccccacaaatgccatcatctgacgcctctggggatggtgaccttgaaacagtcatggagctgggccagaaaccagagaccagagtcccatgcctgggatttgagcagtggtctcagaggcttctcagtttctagggaaatgcaccccacatgtcccacaccagagtcctcaagcttgggaaatgctttgggacaggaagacctcatggctccaagtactcaggacattatctcccaaaaacctaatgggggagaccttcatccccaaatcagatccccctagtggagacatttcttcaggccctgtaagaccaactagtaatagaattaataccaacaggccggtgcagtggcccatacctataatctcagcactttgggaggccaagtggggcagattacttgaagtcaggagttcgagaccatcctggccaacatggtgaaaccccatgtctctactaaaaatacaaaaattagccaggcatggtggtgggtaccgtaatcccagctactcaggaggctgaggcaggagaatcccttgaacccgggaggcggagcttgcagtgagccgaggttacaccactgtgctccaacctagcctgcttgacagaacaagactctctctctctctctcagaatgattctggcaagggcgacagagtgagaatccgtctcaaaaaaaaaaaaaagaaagaaaaaaaagaattagtaccaacaatcataattcacagcgtgggcagaaggaagtggatagacttccattcagaagctcctgggttcgaatcctggacccatccataaatacacaaggaaggaaggaaggaaggaatagtggacaaataggcctttcagcccattccaaaagactttatcatatcccttctcagatgcccaagccttgtgttgcacaaggccagggccccagagaggcctcaggcttccaaaagtttccagccttataggggagatagtgcccgacacagacactcccactactattactgctcacagcaataacagaagaaatcacaggcaggcgagacacagggaagggagccaagggggagggacaaggatagaggaaggatgccagaaccaaaaagagagagaggaagtggagtgcaagaatggtagacggcacgtggccagtggctgttacacactggccagggaggaagttgggctgaacaacctagataataaacggcagcgggaggctgattcgccttcccagatctttcccatttctgttctgcttttctttgcatactcccggagacagggagctcactcctgagaaaggaggttcaatgtttcctgggcatggaccactgtccagaagttccaagcaagatgatttgtcaagtagtagcccctatgggtcaaagggctaaagggggccaggcgcggcggctcacgcctgtaatcccagcactttgggaggccaaggcaggaggatcacttgaggtcaggagttcgagaccagcctggccaacatggtgaaaccccatctctgccgggcacggtggctcacgcctgtaatcccagcactttgggaggccgaggcaggcagatcacgaggtcaggagatcgagaccacggtgaaaccccgtctctactgaaaatacaaaaaattagctgggcacagtggcgggcgcctgtagtcccagctactcgggaggctgaggcaggagaatggcatgaacctgggaggtggagcttgcagtgagccgagatcgcgccactacccttcagcctgggcgacagagcgagactctgtctctaaaagaaaagaaaagaaaagaaaagaaaagaaaagaaaagaaaagaaaagaaaagaaacctcatctctactaaaatacaaaaattagcagggcatggtggcggacacctataatcccgctacttgggaggctgaggcaagggaatcgcttgaacccgggaggcagaggttgcagtgagctgagattgtgccattgcactccagcctgggcggcagaatgagactccatctcaagaaaaggaaaggagaggagaggagaggggagaggaggggaggggaggggagggagaggaagggaggggaggggaggagaggagaggagaggggagagaaggggaggggaggggagaagaggagaggaggggaggggaggagaggagaagagaggggaggaaaggaaagaaaagcctaaagaggattatctggggagagagaggtacccatgtgcgcaacgcaggcagtcccttgcacaggctggatctagagtaagacccacttgggttcaaacctgctctaccacttacaggcctggtgacttcatccctccaaatctcagtttcctcttctttcctctgaaagtgaccacagtaactgtgcctactcatctgtgcctacatacaagcacaaaactcatcgctttgtgcttgtatgtaatgagctaatgcaataaaatacctggcgcacaggaggtgcagaataagtgttgccctgttccaggcaggcccagagtgctccggttgtgtcccaaacacacatgtactttcttacctctaaaactttgcacctgctgtaaacttctgcctcaccagctcttgccccaccacccacaaggcaaactcctacacatcccttaaagccctacctacaagatagatttcttttctctgttcaagccctgacctagagagctgggagcatccataggcaccgggttctgatgcggcctactgtcatgtgatgtgagttcctggagggcaggagttctgacctacatgcagcaggcacgcaatcaaagcttgttcaatgaaaaaaaaaatgaatgaatggtcacttgggagaggcggctcccaagcggacacccaggagtcggccaacccctttaacgcccgcatcccctgctctccacgacctcaaagggcctgtaagtggtcgacaaaaaggggcggggatgcggtggttccgggcggggtcttcagcccttccggtgcggcccctttaagaggcggggcctgcggggcgggcgccgagaacgccggggcggcccgaagatggcggcggtggctggatctggggctgccgcggctccgagctcactgctcctcgtggtgggcagcgagttcgggagcccggggctcctcacctacgtcctggaggagctcgaaagaggtcgggctggcctgggggcccgcgggagcccgggaggcgggcccgttcgcgcgtctgggcccggggccggcggggtggggcggcggcggcggcggcggcgggacccgggctccggggcgggggtcgcgggcctggggctgggtccccttcaccgttaggcgcacgacgcgggcaaaggcggggtgcccgtgggtgcccgcggagaaagtggcatccgggcctgggctgggcagggctgccccgccccaactccgggtgaagataggggaggggacacgggcctgggcttggggacccttgcagttggaccacggctccgcttcccgcctgactggcctgcccgggggtagggcctggggtcgctttggatctccaggtcttagcagcttagatagagatctcccggagggagaagcagatatgggggaggctgggcctggagccccggggcccgctttctgttgcctcacaaggagctgctaattggggtgtgggcgggtgcggcctgccctggggatttggcacctagggaggtgagtcataggcgcacctgccaggttcacctgcagccacttggctcagtgggactggcgggcgtgatgcgcccgtgggtggagatgggtgttcatcccccatccctcggagcatctggacctggcgtttcattgcatgtaaaatgggacaggaacacgcacctcggttcatgtgcttgaggagtgtttagtgagcacctgctatgcgccaggcctttgggcagtggacacagggatatggccgggatgatagacaggttcagccctgccaacacaggtctggtttggggatggacccaaagcgagtgaggagatggaacaagcttccagctcacatggtgtcaggaaggatgagaaggctgcaagggactgagaggacagtcagtcttagcacccgaaggtgctgagggggaagggccccctggccagtaggaacaggtgggggcggcagggggatggacttccaggcaggggaaacagctgttgcaagggcggtgagtggaaacgggtctggcagggcataggagcagcgaggaggtggagatggaggaggtggaggctttgttgctgatgaatcttgtgtgtaaaatgatgaggtgtgctctgggtcccctggctcagctgcagcgagacctgaaggtgttgggtacttctgagtctccaagctgtgagtgaagggaggaggctggggcgctccccacccacggggtgctaattattgaaatattctgggagctggggggcccggctgaactcccgccttgatccctccttcccaccaggcatccggtcttgggatgtcgatcctggcgtctgcaaccttgatgaacagctcaaggtctttgtgtcccgacactctgccaccttctccagcattgtgaaaggtgaggctggggtccccctgactgctccctacctcttgttatttggggaagtgccagccgtgtgccaggcatggggggtgggatgcagctataaataacaacagtaataatacagttgagacctttcaaatgcaagccgtgacccagtgataaccccctcagtcctcagcaacccacagtgcaggaactggtgtttttgtccctgattgacagatgaggaaattggcattgaagggggaagaggcagggagatctctgaggagggggttttttgatgagaaactgctatgactggtgtgtccagtggaagggaagggccccagtcaagacccagcagtggacagaacatctagaatgaaccgggcgcggtggcttacgcctctgatctcagcactttgggaggccgcagcgggcggatcacttgaggtcaggagttggagactagcctggccaacgtggaggaaccctgtctctactaagaatacaaaaataacggcatggtggcaggcgcctctaatcccagctactcgggaggctgaggtgggaggatcacatgaacccaggaggcagaggttacagtggggctgagactgcgccactgcactcctgcctgagtgacagagtgggagggactctgtctcagaacaaacaaacaaacaaaaaacatctggaaggtggaggggcactgagcaggccctggaagatggagtgtgggccccttgcaggaagggactgatactggttcacagccacaggcctgggtatacagtaggcagggaactgaaaaggagtgagatcaagaagggcccaactcagcacgaggctcccttctagggtgacccagggtgagcagagcagcaggcgggcaggcagggcttgggtgttgcctgcagccgcccccggctcctgatggtctcttgagtcacctcccggctgctgctggagaggaaggaagtgtctgtagtctcattgtcccagttggtccttgtggcttcctgacacttcatggggcagaaagtggagctggaaatcctgtctgctgtgtgtgaacttcgtggccacttcccttctttatgccttgatttccccacctgaatggggcaatatccctgtgtggcaaaaagcgtgctaaggctgggtggggtggctctcgcctgtaatcccaacactttgggaggtcaaagtgggaggattttttgaggtcaggagttcaaaaccagctggggcaacatggtgaaaccctgtccctactgaaaatgcaaaaatgagctggacctggtggtgcacacctgtagtcccagctactcaggagcccgaggagggaggatcgcttttacccaggaggcagaggctgcagtgagctaagattgtgccactgcacttcagcctgggcaacagagcgagaccctgtctcaaaaaaataaacttaggcctgacatggtggctcacacctataatcccagcactttggaaggctgaggtgggtggatcacctgaggtcaggagttcgagaccagcctgaccagtatggtgacaccccatctctactaaaaatacaaaaattagctggttgtggtggcaagcgcctataaccccagctacttgggagactgaggttggagaattgcttgaactcaggaggcagaggttgcagtgagctgagatcgtgccactacacttcagcctgggcaatagagggagattccatctcaaaaaagagagagagagagagggagggagggagggagggggagagggagggagagagagagagaaaggaaagagaaagctaaatgtgataagggcgagagagagagaaagggaaaagaaggaaagaaaggaaagaaagttaaatgtgataagggctggcaacactggagggtctctgcctctcaagactcagccttgttcacagttcagtcctgcctcaggggccttggctggtgctgtaccctggtccgggttggccctcaccggcccccaccccggctctggctccttgccacccccctctcacagtactgatgtttaaaacacatacgggccctgggggacagagcagggtcaggatcccagaaacagccctacttcagccccggcccttatgctgccccacccctagctgagtcctgcctcaggacctttgctccggatgtaccctcgtccacgttcgccctcattggccctcctcgagctctggctctctgtctgaaaaataaatgtggccggatgggtgcagtgggtcaagtctgtaatcccagcactttgggaggccgaggcaggcggatcacctgaggtcaggagtttgagaccagcctgacccacatgttaaaaccccgtctctactaaaaattgaaaaaattaatggggcgtggtggcgtgtgcctgtaatcccagctactcgggaggctgaggcaggagaattgcttgaacccaggaggcggaggttgcagtgagcccaggttgcactgttgcacgccagcctgggcaacaagagcaaaactccgtctcaaaaaaaaagaaaagaaaaaggccgggcgcggtggctcacgcctgtaatcccagcactttgggaggccgaggcaggcggatcacgaggtcaggatatggagactatcctggcttacacggtgaaaccctgtctctactaaaaatacaaaaacttagccgggtgtggtggcgggcacctgtagtcctggctactcgggaggctgaggcaggagaatggcgtgaacccgggaggaggagcggagcttgcagtgagcagagattgcaccactgccctccagcctgggcgacagagcgagactccgtctcacaaaaaaaagaagaaaatggtggcatcactcccaggggtgacagctgcaaaccaggccctgcgcacgatggggccctctggttactgcctctcttaggccagctggggtggtttgagtttctctttcttgcctggtcctgacctgcagctctgccgtgcgcctgttaatctccatatgatccctgggtgggttcccagaggggttcatgttccctgagggtcacacggggaggcaggatttgactccgggacggcctgattcccccacaggccagcggagcctgcaccaccgtggagacaacctggagaccctggtcctcctgaacccatcagacaagtccctgtatgatgaggtagggaatggctgacgtcctggagggggcgggctgctgggacccgtgccttctctgtcttcctgtctcgtgtccttgtcttcatgctgccccagatcctctcaagacacccggcaccacacttcttcgcccacgaagccttccctgtggcttcagcctccgcttcttccctcctctggggtgggagcagaaaagcctggactttgggagggaggggagggtaagcactcccagctcagggcccaggacagcgtgggtctggaggtgggaaggccagagcagacaggttttcctcctgtgggttccctccggctaggccccaggagttgtctgaatcgactcactaacattaaccagcttgtggccatctgtactctaccaattatacatccggaagatgaaccagacagagccctggggcatcccactacagaccttcttacaggttgattccttggatcaacttttcccttttgttcccttgaggggctctcagtctttaagagacagagtgagacacagacacccccagccctgtggcatcagggctgggctggagggagaggtggactagagagagcccagaaagggcaagtagtgccttcaggaggaagggacatcagagctgggctttgtaggatgaataggagtttgctagggttgctccagggcccagcaggagacctggagactgccttcgtagctagttgagcactgggctggtcgtggggtgaggacaggagaggggtggttatgtatcgactcgaggctaccccaaagaggactgctggatacgtcactgcacagaacgggtcctttagtgttcaccccctccctcagctccggaaccttctgttggaccctgcctctcacaagctactggtgttggctgggccctgcctggaggagacgggggagctgctgctacagacagggggcttctcgcctcaccacttcctccaggtcctgaaggacagagaggtaagccacccctttgccatcccctgcttccccagctctgaatcctgactggggtgtatcaggctgtgtggcaccagcgacctgctgttttccatggcctggtctccccatcctctgtaggatggcagtggtgacacatgcctcctggctgtctggggtcagtcccattgcccgcgaaagggtgtggtgtgagctgagtttgtaggtcagcagatgtcccaaagtcctgatgagggatggagccaaatgggtccttcctggtgcccgcagtctgggtaggacacatgggcaaaatggcaaacctcactttcacattgtagtggggcacttaaaaatggtgagaaaaggttcagtagacaggtggggcgtggagagtctccttggagggagctgtgccctgggaggagagaatggtgagtgtaaaggccctggggcagggaggcatttgaaggggagggagagacaggaggtgaggccagatcaaagagccttgtggcgctggagagggttgggttttggcgggagggccctgaggagcaggccctgggggaaaggatgagggtgtcctcgcccagttttcccaccgggctaggtgttgcctggctctaggtggtcccttaccactcctcctccatacagatccgggacatcctggccaccacgcccccacctgtgcagccgcccatactcaccatcacctgccccaccttcggtgactgggctcagctggcacccgctgtgcctggccttcagggggcgctccggctccagctgcggctgaaccccccggcgcagctgcccaactctgagggcctgtgcgaattcctggagtacgtggctgagtctctggagccaccgtcccccttcgagctgctggagcccccgacctccgggggcttcctcaggctgggccggccctgctgctacatcttccctggaggcctcggggatgccgccttcttcgccgtcaatggcttcactgtgctggtcaacggtggctcaaaccccaagtccagtttctggaagctggtgcggcacctggaccgcgtggatgccgtgctggtgacccaccctggcgccgacagcctccccggcctcaacagcctgctgcggcgcaaactggcggagcgctccgaggtggctgctggtgggggctcctgggacgacaggctgcgcaggctcatctcccccaacctgggggtcgtgttcttcaacgcctgcgaggccgcgtcgcggctggcgcgcggcgaggatgaggcggagctggcgctgagcctcctggcgcagctgggcatcacgcctctgccactcagccgcggccccgtgccagccaaacccaccgtgctcttcgagaagatgggcgtgggccggctggacatgtatgtgctgcacccgccctccgccggcgccgagcgcacgctggcctctgtgtgcgccctgctggtgtggcaccccgccggccccggcgagaaggtggtgcgcgtgctgttccccggttgcaccccgcccgcctgcctcctggacggcctggtccgcctgcagcacttgaggttcctgcgagagcccgtggtgacgccccaggacctggaggggccggggcgagccgagagcaaagagagcgtgggctcccgggacagctcgaagagagagggcctcctggccacccaccctagacctggccaggagcgccctggggtggcccgcaaggagccagcacgggctgaggccccacgcaagactgagaaagaagccaagaccccccgggagttgaagaaagaccccaaaccgagtgtctcccggacccagccgcgggaggtgcgccgggcagcctcttctgtgcccaacctcaagaagacgaatgcccaggcggcacccaagccccgcaaagcgcccagcacgtcccactctggcttcccgccggtggcaaatggaccccgcagcccgcccagcctccgatgtggagaagccagcccccccagtgcagcctgcggctctccggcctcccagctggtggccacgcccagcctggagctggggccgatcccagccggggaggagaaggcactggagctgcctttggccgccagctcaatcccaaggccacgcacaccctcccctgagtcccaccggagccccgcagagggcagcgagcggctgtcgctgagcccactgcggggcggggaggccgggccagacgcctcacccacagtgaccacacccacggtgaccacgccctcactacccgcagaggtgggctccccgcactcgaccgaggtggacgagtccctgtcggtgtcctttgagcaggtgctgccgccatccgcccccaccagtgaggctgggctgagcctcccgctgcgtggcccccgggcgcggcgctcggcttccccacacgatgtggacctgtgcctggtgtcaccctgtgaatttgagcatcgcaaggcggtgccaatggcaccggcacctgcgtcccccggcagctcgaatgacagcagtgcccggtcacaggaacgggcaggtgggctgggggccgaggagacgccacccacatcggtcagcgagtccctgcccaccctgtctgactcggatcccgtgcccctggcccccggtgcggcagactcagacgaagacacagagggctttggagtccctcgccacgaccctttgcctgaccccctcaaggtccccccaccactgcctgacccatccagcatctgcatggtggaccccgagatgctgccccccaagacagcacggcaaacggagaacgtcagccgcacccggaagcccctggcccgccccaactcacgcgctgccgcccccaaagccactccagtggctgctgccaaaaccaaggggcttgctggtggggaccgtgccagccgaccactcagtgcccggagtgagcccagtgagaagggaggccgggcacccctgtccagaaagtcctcaacccccaagactgccactcgaggcccgtcgggtgagtactggagctggggccctgggctgggttagcagctgcttaggctggagagcatagctcgtccccctgtttttacattttcagtttttttaaaagagatggtctcactctgtctctgagctggagtgcagtggtgtggtcacagctcattgcagccttgaacaatggggctcaagccaccctcccacctcagcctctccagtagctgggactactggcaccgccactacccctgcctaattttaaagtttttggtagagatagggtcttactatgttgcctgggctgatttcaaactcctggcctcaagctgtgtgcccacctcagcctcccaaagtgttgggatgactggcgtgagccacggtgccctgccagttctgttcttttttttttttttgagacagaatttcgttcttgttgcccaggcaagaatgcaatggcacgatcttggctgactgcaacctctgactcccgggttcaaacaattctcctgtctcagcctcccgagtaggtgggattacaggtgcctgccaccacgcctggctaatttttgtatttttagtagagttggggtttcaccatgttggccaggctggtctcgaactccggacctcaggtgatctgcccaccttggcctcccaaagtgctgggattacaggcatgagccactgcacccagccaagtcctcctgttcgtaattacttcgtgacctcagccgtgcccacctctccggggctcagtttctcctgtgaaatggaaactgacctcagtgttgaagcacttgccattctgaggtgcctggacaggtgagcacgtatgccaactgtgggtttctagaagccacaataagtaaaatgaaacagttgaaaatttaaatagcgtattttatgtaactgattggttaggaggacccggcctatggttgcactcatagcagagcaaaatcagcaaagagaaaaggcacatagggtgaagtccaaaggaaaccaggcagaagcttccagaatcctctcccagtggggctgcacaccacaggcttcatttctccagtagcaagttgtaacagtgtgtccctcatggaagctcattagacacagcatgcccaggtttcctattgggccattacataggcatcttctgcctggcacccacactctagactccccaaaaaggagaaatcaggtgtgtggtccagtccaggcacagggagcccctctcagacagggaatggtgggaaccctctgcctaagatccaaattcccagagaccagccaaaggctcacattttaagcaggccttgctgagaggagggtctctggcctgctgtgctgttctttgttttttttctgagacagagtctcactctgtcatccaggctggagtgcagtggcgcaaacatggctcactgcagcctcgacctcctgggttcaagcaaccctcccacctcaacctcccgaacaggtgggaccacagacacgcaccataacggccagctaatttttttttgagatggagtcttgctctgtcaccaggctggagtgcagtggtgcgatctgagctcactgcaacctctacctcccggggtcaagcgattctcctacctcagcctcccaagtagctgagattacaggcatgcgcaaccatgcccagctaatttttgtatttttagtagagatggggtttcaccatgctggtcaggccggtctcgaactcctggcctcgtgatctgcccgcctcggcctcccaaagtactgggattacagacgtgagccactgtgcccagcctacgcccagctaattttaaaatttttcagtagcactggggtctcactatgttgccctggctggtcttgaactcctgaactcaagtgatcctttggcctcggcctcccaaagtgctgggattataggcataagccaccacgcccgactcaacgtttaattttggatgaaccgccagactgttttccacagcagctgcttgacgctagccagtctaatgggtgtgaggtgggatctcattgtggttttgatttccatgtccctaatgattagtgatgttgcatcttttcatatgcctattggccatttgtctgtcttctttggagaaatgtctattcaattcctttgctcattttaaaattttgttttactttttagagacagggtctcggtctgttacccatgctggagtgtagtgcaaacacagctcattatagcctcaacttcctgggctcaagtgatcctcccagctcagcctcccaagtagctgggactacacaggtgcatgccatcgtgcctggccaattgtttaatgttttgtagagatggagtctcactatgttgcccaggctgatcttgaactcccagcctcaagcgattctctcgccttggcctcccaaactgttgggattacaggcatgagccaccatacctagccccctttgcccatttttaaattgagttgttttccgttgctgagttttaggagttttttaaatcattctggacattaatcctttagcagataaatggcttgcaaatatttcctcccattctgtgagctgcctttttattcttttgatagtgccctttgatgcacaaaagttttaaattctcatgaagtccattttgtctatttttttcttttgttgtctgcacttttgatgtcagacccaataaatgattgccacatcgattttttttcttttttctttttcttttttttttttttcagatgagtctggctctgttgcccaggctgcagcatgggagcactatcttggctcactgcaacctccgcctcccgggttcaagcgattctcctgcctcagccttcctgagtagctgcgattacaggcacccaccaccacacctggctaattttttttgtgtttttagtagacacggggtttcaccacgttggccaggctggtttcaaactcctgacctcaagtgatctgcccgcctcggcctcccagagtactaagattatagatgtgagtcaccatgcctggtcaaatccaacagtgagaagcttctaccccatgttttcttccaggagttttaagttttccatttcacatttaggtccatttggaggtaatttttgtatgtggtgaaaagatccagtgtcattctcttgcatgtggaagcccagctttcccagcaccatttgttgaaaagactatcctttccccattgaatgtttggaacgcttgttgaagatcatttcagcatacatgtgatgatttatttccgggcctctattgtattccattggtctatatgtctgtctttatgccagtgccacgctgttttgattactgtagctttgtagtaagttttgaaatctggaagtgtgagtcctctatcttgattcttctatttcatgattgtttaatctccttttcacattgttcattgttcatgtatagaaattcaactgtgttttgcctgtggactttgtaccttgcttctttgctgaattcgtttattattattttttgagatggagtctcactctgtcgcccaggctggagtgcagtggcacaatctcagctcactgcaacctccacttcctgggttcaagcagttctcctgcctctgcctcccgagtagctgggattacaggcacctgccaccacgcccagctaatttttgtatttttagtaagagacagggtttcgccatgttggctaggctggtcttgaactcctgacctcaagtgatctgcctgcctcagcctcccaaagtgctgggattacaggcgtgagccactgcacccccaggcctgattttttacattattgttcataaagtctgttgaactggcattttcttgtagaattaaatatctgtgcctggctttggtattaagacaattctggtcttataaaatgagttaggaagtgttccttcctcttcagttcctcggaaaagtttgagaaaggctgatgttagttctctaaatgtttagtggcttccccagggcttttctttgttgggaggtcgtaagttactgattcattctccttgctagctacaggtatgtgctgattttctatttttgtgattgtgtcttggtagtttttgtgtttctaggaatgtgtccatttcggctgagggtatgcatttgttggtatacagacggggtagtactcttaccccctgagctgggcagcagctgtgattgtaagatgcagggtctggcaggcttcttgtgcccgagacccagccgtatcctttcatttcattgatcattcacttgcccagggctggtggccttgtcccctttggccctaaggtcagggtttggacaaggcccccagagctgctgtctcatccgcatccagcatcccgcagtgatcttgggcccgcctctcaaggctctgtccacccaccctggctccccatcacccttggggcagggattctgtctgtcttggtcacagccctgtttcagggcctggtgcccatgaggttctgttaaatgccccttgagcaagtgaaccagacaaatgctgcagaagcagcagatggtccaggcactggctgctttcagggctcaaactcttaaaccctcttccaggaagcattccctgattgccacccactcgccccccagccctggggatgtctatgtccagggactggctggggatgagtcaggctctaggcacaaaggggtggccggtggtgtttgtagagtgagtgaagagtcactggagtcaaggcgtggtgacatgcacctgtagtcccatctacttggaaggctgaggcaggaggatcacttgagcccaggagtttgtgacgagcctgggcagcatagcgagaccccatttcttaaaataagattcactggagtcatgagcgcaccaggcctccccagaaaactctgagttcaggcctcctgctgaggagggagctgctctgagtggtgcaggtcgaacttggagcctcggcccctccccagccccaggagctcatccctgcctccccatccccccgcccgcagggtcagccagcagccggcccggggtgtcagccaccccacccaagtccccggtctacctggacctggcctacctgcccagcgggagcagcgcccacctggtggatgaggagttcttccagcgcgtgcgcgcgctctgctacgtcatcagtggccaggaccagcgcaaggaggaaggcatgcgggccgtcctggacgcgctactggccagcaagcagcattgggaccgtgacctgcaggtgcgtgtcaccccagggcctctggtggtaagtgtagttagcacagatgggtaaaaccaccctcgaccctcagagactaagctgtgttccccaggccacacgggaatgggggcgaatgtgggagtctcacatggctcagcccttaggggtctcttcggactctgattctgtcgtgtcactgttgtcattggctgtgctggaagcctgggggaggacgcagggcctcgtgaagcctcatggttctatcccttccccagacaccttgtcacttagccattgttccgctgtgagaattagtcgggatggaataggtgggctgggtggtatctgtgcggctgagaaccctcccccatggctgcatgaagctgagagactgaaaccaagccctgcagggcgaggtgcatgtgggcagagggaggaccgcctcacaccgcggcccctgccctctcatagctgctaggctggcttcaaaggagtgtccctgtagggtgcacgacccaggaaaaggcccagaggtaggaaagaggttggtgtgttcaaggagcagggggagatccaagtgagtagagaggggtctcaggccaaggaaggccttgcagaggaggagctccgtctcctgtgtgctgagaaggctctttgggtgctggttgggaggaacagggacctcacagacgggctgaccacccattgcagacctcaaggtggagcacacaagatcagggaaaagccaggaggggtctcaaatgccaggaaaggaaggcgacttgggcccaggccagaagggcagggggcacccccctcactggtggtccactctccccacacaccccccctccacctgcaggtgaccctgatccccactttcgactcggtggccatgcatacgtggtacgcagagacgcacgcccggcaccaggcgctgggcatcacggtgttgggcagcaacagcatggtgtccatgcaggatgacgccttcccggcctgcaaggtggagttctagccccatcgccgacacgccccccactcagcccagcccgcctgtccctagattcagccacatcagaaataaactgtgactacacttggctgtggcctctcttctttctgtgatgggagacttggcatgtacctcctggtcctgcgggtggggacagcttccatggaatccccagtgaccctgcggtcaggcccactctggcctccatgtcgcagatgggagaaatgcaggcttcgctgggcctggtttggggaaggaagtgcctctcagagttaatgaccactgaccggtggagctcctgactatggcctccatcccgactcagcaactgtgaggggcccaagttataggcgcgaagtagctacctgactatctgtcacacaaaccagttggtggcagggggagattgaatacctgtctctgctccaaagccatcaaacaaaagctatcctgctgtccctagaggagatggatgcttattccagaaagtcttactctgcaggaaggatttacagaggaatctgaaacccagagattacagaatatccacttctgactaatgcaccctgacccctctctgcagaaatacaagcacttaggtttactattagatacaatgtcatctgtactgggttgaatggcagccagcccccaaaacacattcaacacctgacccctgacacctgtgaatgtgatgttattttgaaaaaggatctttgcagatacagttttattattttttgagatggagtcttgctctgtcacccacgctggagtgcagtggggcgatcttggctcactgcaacccccgcctcctagattcaagcgattcttgtgcctcagcctctctagtagctgggattacaggcacacgccaccacgcccggctaatttttgtatttttagtagagacggggtttcaccaggttggccaggctggtctcgaactcctgacctcagatgatccacccgcctcggtctcccgaagtgctggattacaggtgtgagccaccatatgcctggcccttcacagggtcttacggtcacagggtaggtgatcaggaagggcaggtggagcagaggagccatgcctgtgcctgccacctcctgtccaatgcctgctagcaatgccaagatcgctaagctcagccagccacctcccacttccacctacccaccctccacacctctgcagcggaaacttaacagggatgggagtcctgggagaaaggccccagcctaggcgagttgacacagcagtgcaaagccagccctgcccagttccccatcagctggcactcaagttatggccttttctccgttgccagggtaaggatggacctcttctggggtcaccatttatacatgaggatgattcccctgggtttcttgttttggccaaactgtctagtgacccctgctgcctacttgttcttatttcaattgtcccgttatcagggaggtttctttctatttatgggctctttcttttttttttttttttgagacagtttctctctcttgtccaggctggagtgcaatggtgcaatctcagctcacagcaacctcaggctccgaggttcaagcaattctcgtgcctcaggctcccgagtagctgggattaccggcatgttccaccatgcccggctaatttttgtatttttagtagaaatggggttttgccatgttgaccaagctggtctcaaactcccggcctcaagtgatccacccacttcagcctcccaaagtactgggattccaggcatgagccaccgtgcccagcccaggcctttttccttctttctcttgagacagggtctcgctcagtcacctagatgactgcagtggcacaatgtcggctcactgcaacctctgcctcctgggcttaagtgatcctcccacctcagcctcctgagtagctgggactgcctggctaattttttgtatttttggtagagccggggttttgccatgttggccaggctggtcttgaactcctaacctcaggtgatccacccactttggcctcccaaagtgctaggattacaggcatgagccactgggcccagccctttttttttcttttgagacagggcctcactgttgcccaggctggagggcagtggcatgatcatgtctcattgcagcctcgacctcccagactcaagtgatcctccgaccttggcctcccaagtaagtaggaccacaggtgtgcgtcaccacacccgcctaatttcttttattatttgtagagatgagatctcactatgttgcccaggctgatcatgaactcctgggctcaagcgatcctacttcggcctcccaaagtgctgggatttacaggcgtgagccactgtgcctggcttacaggcctttttctaattagctggtttgatatttttctcattgggtatttgtctttttctcattcctacacaattttcttttttaaattagggataataaacttatgtggtaaatgttttccaaatgtacttttccattttgtttaggcatgattttgctgtagagatatatatatttttttgatggtctctcgttgcccaggctggagtgcagtgggtgggatcacagtcactgcagcctggaacttctagcttcaagtgatcctcccacctcagcctcccaaagtgctggaattacaggcatgagccactgcacctggccaaactgcaactttttttttaaaacggagtcttgctctgtcacccaggctggagtgcagtggcgcgatcttggctcactgcaagctctgcctcccgggttcacgccattctcctgcctcagcctcccgagtagctgggactacaggcgcctgccaccacgcccagctaactttttttttgtaattttagtagagatggtgtttctgtctctattaagatgaggagagtacatagaacttgccagtcatttcaacaaatgttgtaaatggacagaaatctctagttaaaaggcaaaaggtggctgggcacggtggttcatgcctgtaatcccagcactttgggaggctgaggtgggcagatcacttgaggtcaggatttcgagacccccaacttgggcaatgtagtgaaaccccatctccactaaaaatacaaaaattagccaggcatggtggcacatgcctgtaatcccagctactcaggaggaggctgaggcaggagaatcacttaaacctgggaggaaggacgttgcagtgaggcgatcgtgccactgcattccaacctgggcgacagagcaagactctgaaaaaaaaaaaaaaaaaaaaaaaaagccaaagaataaactttgttggtattgtaagccatatagtctgtccagaccactgaattcctttgttgtaggctgaacagactacaacaaatgggtgtggtataaacatagaaccagtccaatctggttcagctttgttagtaacaaaatgtaacaaaatgatgagtcgtttttcagtgcaatggacccccagggtgcaagtcacatatcgctggagcattaacagatgaacaaagcatgcccaattcataacccttgggtggaatgaaaaagtcaactacaggtagaacccaagtactcggatcaaggaatggggactatgctgggcgtggtgactcatgcctgtaatcccagcactttgggaggcccaggcagacggatcacctgaggtcaggagttcgagcctggccaacatggtgaaaccgtctctactaaaaatacaaaagaaactaacggggcatggtggtgcgcacctgtaatcccagctactcaggaggctgaggcagggagagttgcttgaacccaggaagtagagattgcagtgagctgagatcccaccgtcactgagatccagcctgggtgacagagcgaggctccatctcaaaaaaaaaaaaaggaatggggaccaaattaaaaagagaaagctgggtgtggtgtctcatgcccaggaattggagactagcctgggcaacatagtgagaccccgtctacaaaagatacaaaaattagctgtgtgttgtaacatacgcctgtagtcccagctacttgggaggctggggtgggaagatcacttgagcttccggaggttgaggctacagatagctgtgatttcgccattgcactctagcctgggcaacagagcaagaccctgtctcaaaaaataaaagggggagggcggtgccttgtttactgcagtgtggacttgagcaccaaaaacacatcatcgcccctgcacgtgatgcagtcatatcacccccattgcatttccgtatctctcccatgataaccctctgcctatgaaacctgcccccaagctccagcttgaagagacagatttgaacttcgcctactgtctccttgccagttgactctcaaaaaagctttttaggccaggtgcagtggctcatgcctgtaatcccagcactttgggaggccgaggcagacgcatcacttgaggtcaggagttcaagatcagcctggccaacatggagaaaccccatctctactaaaaatacaaaaattagccaggtgtgctggtgcacgtcttgtaatcccagctactctgtggcagaagaattgcttgaacctgggaggcagaggttgcagtaagctgagatcgcaccactgcactccagcctgggcaacagagcaagattctgtctcaaaacaaaataaaaacaaaaactgttggaagttcctcccactgggcaaacagtgtcaggtgggcgagtgaaacacaaagaagcaacagcccatggtgtgaggtgtggggaggtggcacgcgcaccccgagggctcagaggaagccttttagcgctgccgccttgggggttaaaggaggcttcccaaggatgcaaaagggtgagccttattagggaaggggaagggtgctcctggaggagggaccggcagaggcaaaggcctggtttgctggaggaactgagagaagggtgacattgacgcccccgcaaagggggaagagtgtgggaggcagctgcctggaggcctcactgagcagctgggaccaaatcccatggggccctgggggaggggagacgcaggggaagcgggcttaaagtggacttgggagaggcccgccagtggaagaggggtgggggtgggggtgccaggtcctggtggggcgtggccagagctcatttctgggaagatgtcagctcttcccagagagaggcagtgatggggcagggcgtggtggagccctgcctggtatggtacctcctccaggtagccctccttgctacctcttagtccactgcctggacccttcctgactccctctcttaaaagtgtcctggccaggcatggtggcttacgcctgtcatcccagcactttgggaagctgaggcaggcggatcaccagaagtcgggagtttgagaacagcctggccaacatagtcacaccccgtctctactaaaaatacaaaaattagggccggatgcagtgtctcactcctgtcatcctagcgctttgggagggtgaggtgggtggctcacctgaggtcaggagttcgagaccagcctgaccaacctggttagcggggcgtggtggcacacgcctgtaatcccagctactctggagcctgaggcaggagaatcacttgaacccgggaggcagaggttgcagttacccgagatcgcgtcactgcactccagcctgggcgacaaaagcaaaactccgtctcaaaaaaaaaaaaaaaaaattattcgggcgtggtggtgggtgcctgtaatcccagctactcgagaggataaggcaggagaatcgcttgaacctgggaggtgaaggttgcagtgagctgagatggcctgggcaacaaagtgagactgtctcaaaataaataaataaggccgggcgcagcggctcaacgcctgtaatcttagcactttgggaacacctgaggtcaggagtttgagaccagcctggccaacatggtgaaaccccgtctctactaaaaatacaaaaactagctggacgtggtggcgggcgcttgtaatgccagctactcaggggactgaggcaggagaatcacttgaactcgggagatggaggttgcagtgagccgagatcgcaccattgcactccaggctgggggacaaaagcgagacttcatctcaaaataaataaataaataaataaataaataaataaataaataaataaagtgtcgtcctgtccaccagcacatcttcctgttgtatttccttttaatccatagccctagcagactcttacttgtttatatgtttatatgtcaatatgtttatattgattcccccaactgtgagcccatgagagctgcaccctctccatcttggttgtttctgggtgcccgctgcccaggacaggacccagtacctgtacccacacaccaggttcttgggaaatgttggttgtgccccagcttggcagcactgctgggtgacctcgggaatgttccttaacctctctgggcttctcctcttccccagtctcagaaataagaaagttggcctgaacctccaggaagagcagggagccttgggctgttttggcaactggacccctgagttttcttccctggcctgttcggccccaggcactccagacaggcctgacctatgtcatcctgtcctccccaccccctacagcatcctttgggatctgggcccagggcaggtgtgagctgtggtaccagcacacccatgtcaagtcctgcctctgacgtgtgtttgctgtgtgacttccaagagtagcttgctttctctgagctctgtttcccctggcccaggcttgggagtggagtgtctgggggagtgtggatgcagttcagacctcacctgacaggtgtggatagtaccagggccagggcccccaagaagctcccaggctggagggggagggggcaatgcctaacataacatcccagtcctgggggatcagcactggcttggaaggaaaaccagatgggttttcaggagcctgggaagctagctggagggcttcttgaaggagaggaccacataggaactaagagctaaaggtgggaaggaaatctgggatgccagaaggaggacttcctggaggaggggaccacataggaactaagagctaaaggtgggacgggagcctgggaggccagaaggagggcttcctggaggaggggaccacaagagctaaaggtgggaaaggagcctgggaggccagatggagggcttcctggaggaagggaccataagagctaaagttgggaaaggagcctgggaggccagatggagggcttcctggaggaggggaccaaacaggaactaagagctcaaggtaggaaagttaccagtcagatgcaccctgaggtggaacggcttttgtgccccctgcattgaggtgggtagagagaggtgaggacaggaatgtagggagggccggaccccataagcatgatgggctgctgagacaggtttgcagtttttaccaagagtgctggggagtctggggagtgtttcaagctggagaaaaaggtgagcagtttctgtttgaaaccccactgtgggtcccagttaaacattctggaattgctacacacatgcacttcaatggaacagctgagcacgtgaaggtgataggacaggcaagcctcaaaattggggcttagtctgagagggttcttggcttcacccaggaaggaatttgagggcaagtcaattgtgttaaacagcaacttttctttttcttttttcctttcttttttttttaagatagggtctcactctcatgcccatgttggagtgcagtgccatgatcttggctcattgcagcctccaggagtcctcccacctcagcctcctgagaagcttggaccacaggcacagtccaccatgcccacctaattttttttttgagatggggtcgtcttgctctgtcacccaggctggagtgcagtggcatgatctccgctcactgctccctctgcctcctgggctcaagggatcctcccacctcagcctcccaagtagctgggtctacaggcacaagccatggagcccagctaattttttgtatttttggcacaggcagggtttcaccattttgcccaggctggtctcaaactcctgagctcacgtgatcttcccacctgggcctcacaaagtgccaggattgcaggtttgagccaccgcacctggcctaatttttgtattttttttttttttttttttttgtagagatggggttcggccatgttgcccaggctggtaaacagcaacattttcttcttcttctttttttctgagatggagtttagctcttggagtgtgatggcatgatcttggctcactgcaacctctgcctcctgggttcaagcaattctcctgcctcatccttccaagtagctgggattacaggtgcctgcccccacacccagctaatttttttgttcttagtagagatggggcttcatcatattggccagaatggtcttgaactcctgacctcaggtgatccgcccatctcagcctcccaaagtgctgggattataggtgtgagccaccatgcctggccttttctttctttctttttttttttttttagacagggtctcgccttgtcacccagactggagtgcagtggcaccatctcggctcattacaacctccacctcccagtatcaagtaaatctcgtgcctcagcctctccagtagctgggactacaggtgcccaccgccaggtctggtctggctttttttttttttttttttttgagacagagtctcgctgttgcccaggctggagtgcagtggtgtgatgatagctcactgcagcctccaactccctgactcaagcaatcctccagcctcagcctcccgaatagctgggattataggcatgagccaccatgcccagctaatttctgtatttttagtacagacagggtttctccatgttggccaggctggtctcgaactcttgacctcaggtgatccacccatttcagcctcccaaagtgctgggattacaccgcgcttggccctaaacagcggcatttactgaaatggccgtgtagagcagcatcagaggtgctgttccttgctgagcaagaccactgtgcataggcagtccatccagaatagtagctcacaggcacagctgcactcatatgtatacccacttttaattatatgcaaatgaaggccaggcgtggtggctcaagtctgtaatcccagcgctttgagaggctgaggcgggtgggtcacctaaggtcaggagtttgagaccagcctggccaacatggtgaaaccccgtgtctactaaaaatacaaaaattagccaggcatggtggtgtgcgcctgtaatcccagctactcaggaggctgagacaggagaatcgcttgaacccaggaggcagaggttgcggtgcgctgagattatgccactgcactccagcctgggcaacagagcaagataccatctcaaaaaaaaaaaaaaaaaaaaaaaaaaaaaatatatatatatatatatatatatatatatgtatatatatgcaaattaaggggcagtgtatgcagaaacttccaggaaaagggtgacaacttctgagtcatcagggttgttgccatggaaaagggtggtaacttctgcatgttgtcatggcaatggtaaactgacatggcacaccagtgggcatgtcttaaggaaagccccttccctgggggtctgttttataatagctagtcctcaatttggtccaatgtcgcagccccacctctggagttgagtcctgcctcctactttggagggctgacagtgggagccaggtttctcagggataaagtagaagatcacagacaggcaaggggaggaggctgagctcatgttcaacccaatatagatagttacagcaaaatatgtacagatatgtgtatatacatatatacacacatacagctccctgctctgtctgcagacagggcctccaagacacgtcaccccagtaacaagtacacattggccgggtgtggtggtttatgcctgtgatcccagtacattgggaggccgaggcaggaggataacctgaggtcatgagttcacgaccagcctggccaatatggtgaaaccccgtctctgctaaaaatataaaacttagctgggtgtggtcgtgggcgcctgtaatcccagctactaaggaggctgaggcaggagaattgcttgaacctgggaagcggaggttgttgcagtgagccgagatcacgcaactgcactccagcctggcaacagagcgagactctgtctcaagaaaacaaagaaacaaaaaacaaacaaacaaaacaaaaactaaaaaaagcccccaaacctgacagatgccattcggccaggaaatcaaggtcaacaccagcagagtaagtcatgttgacagtttgtacctttgatatggtgtgatgagatgggtgcttcacctctgtggtcttccttccccaaatccattaccctcatttaactgtgagaaagacatcagagaaacctcaatggagggacattctgtagaacacctgaccaccattcctcaaaactgtccccgaaaacaagacagtttgacaaaccgtcacaccccagaacagcctaaggagacatgaggagtaagtgtcatgtaagattctaggacagaaaaaagacattgcaaccaatggccataccagtggaaggtgataatcatgtgggaggcgggccgggcgcactggcccactcctgtaatcccagcaccttggaaggccgaggcaggcagatcacctgaggtcaggagtttgagaccagcctggccaacatgacgaaaccccatttctactaaaaatacaaaaattagctgggtgtggtggtgggtgcctgtaatcccagctactcggaaggctgaggcaggagaattgcttgaacctgggaggcggaggttgcagtgagccgagatagtgccattgcactccagcctggccaacagtgagactctgtctcaaaaaaaaaaaaaagaaaaagaaaaagaaaaaggaaaaagacactgtaacaaatggacataccaatggaaggcgttaatcacgggggaagcaggccaggtacagtggctcacgcctataatcccagcactttgggaggatgagcggggaggatggagtgagctcaggagttcaagaccagcctaggcaacatggtgaaactccgtctgtacaaaaaaatacaaaaattagctggacgtggtggtgcgtgcctgtaatcccggctacttgggacactgaggtgggaggattgcttgagcccgggaggcagagcttgcagtgagctgagatggcactactgcacttcagcctaggtgacaagagcaagaccccgtctcaccaaataaataaattaataataataataataataggccgggtgcagtggcttacacctgtaatcccaacactttgggaggccgaggtgggcggatcatgaggtcaggagatcaagaccatcctggctaacacggtgaaaccccgtctctactaaaaatacaaaaaattagccgggtgtggtggcgggtgcctgtagtcccagctacttgggaggctgagaatggcgtgaacctgggaggcagagcttgcagtgagccaagatcatgccactgcactccagcctgggtgacagagcgagactctgtctcaaataataataataataataataataatagaccaggcacagtggctcatgactgttaatcccagcactttgggtggctgaggtgggaggattgctttagcccgggggtttgataccagcctgggcaacatagggacaccctgtctctattaaaaaaaaaaaattaaagaaaaaaataataggagaagctgggtgttgggtatacaggaactctctgtactctcttcacaataattctaaaactgctctaaaataaaaggtttatttggaaataaaaggaactggccagtttcagtgcttcacgcctgttgtcccagcattttggaaggctgaggtagggggatcgcttcagcctgggagtttgaggctgcagtgagctatgatcacaccactgcactccagcctgggcaactgagcaagacctcgtctctaaacaaagaaagaaagaaaagaaagaacaactacagttgccttggagaatagggattgtctagggctgggatggagggaacaagaaacacaaataagaaaccgagttggcatccaggctgaagacaattgggtcttcgctgggaccactatggggtgtaggaaaatggacaatttggaactgtttcagagacactgaatccacgggatgaaatgctggtaatgaagggaagagaagatccttagggcctcccaagcttctggtctgtgctcctgggctgccctgactgagcctgggaggctggtggaggggcaagaaaatcagccgggtgccctgtccctaagcagagggtaggatgggggactggcgggtgttgtgtaagtttatattttctttttctttgtttttgtttgtttgtttgtttgttttttaagacgaagtctcactcttgtcgcccaggctggagtgcagtgatgtgatctcggctcactgcaacctccgcctctcggattcaagtgattctcctgcctcggcctcccaagtagctgagattacaggcgcctgccaccatgcccagctaatttttgtatttttagtagagacagggtttcaccatgttggtcaggctggtctcgaactcctaacctcaagcgatcgagttcgaactccaaaaaagaactatcatatggcatatgaggggatgacctcctctgcaaggtgccggatcccggggctgccctaggccggctgcagacttgctgtgtggcctccaagcaagatcttgccctctctgagcctcagatttcccatttgtaaaataaagaccaataatgtccaggttacaggcttgtggggggtcatcaactgagccctgcctgttcgctcaataaacgttggtcgctccttactccttaccactgagtctcagggcgaaagagtggcgcctgtctctttaaattatgcaaatagactgcgggtggcgtaagggggggaacataaaaaggagcctagtcttcggctggaccaatcagcgcgctgagctggcggagctgggcgcctaaatggcccaatggggggccgcgcgggatcagagcccgccctgcctcctggcgccgtcgcgggggtggggactttctaggccacgccccgggggcggagcccgccggcagccgcgccgcagccgcggagggaggggcggggcgggctccggtgtcagcgaccaagccgcaggtggcggcgagcgcggggctcggcccgagctcaggaggtgagtgttgccccccggaaccccctgggataccctggcccgcgcagcctcccacgcgcaccgtgccctgcagccccggcggctgcggagggcaaaggcgcggcgggacgcgagggatggagagcagggggttggggctacgcggtgggcgccccggcttccccctccaagtggtaattgggggtccgcaggcgaaaatggggaccgctccccaaatcccccgtctcctggcctagaaccgagcgtgcacgggggcggcgacgacgcgagacccctccccaaattcttttattctaagcctaggtctgggttctggggctgcaaagatgggggcgccgctccccttccagcctggaaccctgggcggtggctgagatggggaccacccgcagattccctcttcccagctccggcctgcagaccaccggggaccgagacgagggaccccttcccttttcctccactgtgaacccctatccaggcctggtggctggaggagctggggtgtcacctggcccctcctctaatctgccccatcccagtcctccaccttaaggatggggtggggggcgtttcactggcatcttctgtggggaccccaaggttggaattttggggaggaggtcactgtggggtcccctgcctggcacggtttatccaggccaggccttgaagggcctggagcctggacttggggggggggtccctcttttactgaggggcggggtgtacagctagcatctgtttctggggattaaaataaatcgaggtaaattaggatcttgccagaggctggctgtgagtggggtgcggaggaggcttggggggtgggggacccctccatctgccttggatcccccgagtcacctgccccagctgcactggggaccaggaggcagtgtcgaatggacctgcttcactggtgaccttgggcaggtgacagcacctttctgaacctcggtttcctcttttgaaaattgaggttgggagcttcggaccctgcattttacagattctgaactcacccagcccacattttgtccaatggtgattcactcttttgcttaacatgtgggtggtttggggtcaagacagcattgggtttggagaccctcccacagtgccttgctatcctctcagcctcagtttactgcactgcaaaatgggttgatgatgacactctgatattggggctgagggcatggggacagggagtaaaacataggaccaagctgcaatggctgggatggggcatcgccaccctggtctcaccattggggccacttagggcacaccctgacccacataccatcacccacgccaggggtgaacctgttctcgggcgaggtcctgggcaggagggggtgggagttgccaggccagctcattccctgtcccttggagcgccctcccagtggtgggcatggggctgggagtctgacacccccaggtttgaatttgcctctacctgtgtgtgtgtttttcccttggtgcctttgtttgttcttctgtgaaatgggctgaattcctctgggaagatgggaggagtctgtgggaggaggaagctctgtaaatacagacatgattattataatattaatgacagtattagtgctctttaaatcgggtcacagctgaccaggaggagggaggggaagggggagtctatcaaaggcattgcctgaggagactccagcacctgggaaagttgggtacacagtaggcattcaatagatgtttgccaaatgaagtgaggaagagggaggggacccatggggaggacagaaaatttctgagaatccctggctcagattcccacttggtggcccgagtcactgtgtgacctggggcacgtgtctcagtttccccatcgtggtgctggttgagataagatactgccttgaggtgtggtgacgagaatcaagccagattgtctgtgatcgcagcccaggtggcgaggccaagaggggagacatgacatagtgggtcattgaaacagcatggtacctgcttgaaccaagtgactggtccgtgggaaggatgagaaaacccttgctactggccctactgtacatacactggggtccaagagagagggaaatgtgagatcctgtttcccaggatcctggaagccagatcgtggaaggtcaggagtggcccaaggtcatcaggcaagacgtcagcggctccggacacccagccaggcaccactcgattcccaggatgggagctcgggtcttgcctttgttgctgatgtggttcctgctttgttttatctgttctggggctgctcacatgtctcagccccaggtttgcaagacttggtgccgggaaggcaggatggggacctctgagtcagctggcaatgtgctgtgtaaccttgggcaagtctccggccatctctgggctttgtgctggtactgtacaggctgggagacttgggttctagcagggctgacttctccatcagacccaaaatgcccagtgtctcaggctcacagtgcttttaggggtccctaggttgatgttttcacttcttttaaaatccaaagggaaaaaaatgaactcttgggttgaaggaaacatttttgtgtataatattaatatatttgtctttatgtcaatgtagttgtaaaatacagttttgttttgttttgtttttgagacagagtctctctctgtcacccaggctggagtgcagtggctcgatctccgctcactgcaacctccatctcctgggttcaagcgattctcctgcctcagcctcccgagtagctgggattacaggcatatgccaccccacccagctaacttttgtatttttagtagagacggggttttaccatgttgcccaggctgttctcgcactcctgggctcaagcaatccacctgcctcggcctcccaaagtgctgggattccaggcatcagccaccacctaaaatataattttaaatttcttttgtagtgaaggaaagcgctcatgaatgcaaaaatgtcttcccctttcttttcttttttttttttttttgagatggagtctcgctctgtcgccaggctggagtgcagtggcgcaatctcggctcactgcaacctctggctcactgcaacctccacctcccgggttcaagtgattctcctgcctcagcctcctgagtagctgggactacaggcatgggccaccacgcccagctaatttttgtatttttagtagagacggggtttcaccgtgttggccaggatagtgtcaacctcttgacctcgtgatccacccaccttggcctctcaaagtgctgggattacaggcgtgagccaccgcgcctggccatgtcttcccctttctgagcgcatttccctctctgagcctcagtttgcccagtctgtgaagtgggtatcggcctacctcaggatggcaagatgttgaatgcctgggccagggttggtgctcagttatttcccaattgccatgattaatatttgttcggtaagaacagctccaggttcaggccggggggctccaggttcaagcgcctcttgtttactcacccatggcctgtgtggttccagggaggtcccatgggtgctgatcgggcgggggaggaaaggtggcggttggatggtaggcggggcggggtgagcttcctgtcccccccccaacccatgcacacaagcctccaacttggtgctgacggaagtggcctcgtggctgtctcctggcgcctgccccgtcagacaggggccccatcccactcgctaccctgtccggtgagtttgagccctggccagtagatacccatcatctcgccttggcccccctcaggaacagaggggaggcccccctgcccggagcctgggtttcaggagaagtagcaggtgtcacttcctgggctggccaaagcctgcatggggccacccgttgccctgccccccgtcccccattccagctgtgagtggtggtttgggttaggggggcggcaaggggagcttggaaacccagagagccacgcgtgatggtttcaaacaggaggtcattggcagacagaccaggggcaaaatcacagtcagccgggaccaatgattgatctctctgtgcctcggtttccttcataaagttggggttgcctctgagggcatggcatgaagattggatgagcagatgcgtgtgaatagttgggtacagggtcgcacacatactggtgctccatgtgtatctgtctgccagaggtggggtgaggcaatctaattgaaactgtgaaaacagtagtgagattcttggtttctggggaacttgggctccttggttcctgggatcttctagaacaatgttggccatccaatacagcagccatcagccccatgtagctactgagccttggaagagaggctggcacagctgaggagctgggcatataattgtatgtatgtatgtatgtatgtatgtatgtatttaattattatttttttaagacagaatctcactctttcaaccaggttggagtgcagtggggcaatcttggctcactacaacctccgcctcccaggttcaagtgattctcctgcctcatcctcccaagtagctgggactacaggtgtgtgccaccacgccctgctgatttttatattttttggtagagatggggtttcaccatgttggccaggcaggtctcgaactcctgacctcaagtgatccacccacctcggcctcccaaagtgctgggattacaggcgtgagccactgcgcccagccaattgtatttaattttacttggtttaacattaatacaaaaattaatacaaaaattaaggccaggggttgtggctcatggctgtaatcccagcactttgggggtcccaggcaggaggatggcttgagctcaggagttcgagactggcctgggccacactagtgagacctagtctctacaaaaaaaaaaaaaaaaatttatttttaattagttagacatgtagtcccagctactcgggtggctgagatgggaggatcacttgagcctgggaagtcgaggctgccatgagctgtgatcatgccactgcacactccagcctgggtgacagagcaagaacctgtctccagaaaaaataaaaaaataaaaaaaacttaatacaaaaattattcaggcgtgagcctgtagtctcagctactcgggaggctactattcaaggctcccttgagcctgggaggtggaggctgcagtgagctatgatcgcaccactgcactccagcctgggcaacagagcgagaccctgtctccaaaaaaaaaaaaaattaagtcaccacatggggctagtggttcccatgccagtcagcacagctctaagagatttggagatgcttagggtcctggtcatggacagaagctaagaaatgatatggaaatttagggcttttcccctagggatgtcagtgtagcatgctcaccaccctacccctgccaccaaactaggtttcctaagggggtgtggtggggactgaagtttttcaggggccctgtcattaaccagtgcagggttgggaatgtttgttgaaacaaataattccttgcccagtgaactcctattcatgctttaaaaccccaactcccatgagccctcctttagtccaggttcttttggaccttgtccctccatctggcccagccctgaccatgcaggacggtgatatctgtgtccagctctgtctctctagactggggactcctgcagggccaggcccgaggctgaatcaactcagggaccctgacattgttctagtctgggtgagcaagtaggaggtcttgggtgactcacagaagtcccgggattggaggctcaatgataatgggtccaattaaactaactaactttctttctttttgagacagggtcttactctgtcgcccaggctggagtgcagtggcgccatctcagctcactgcaacctccgcctcccaggttcaagcgattctcctgtctcagcctcccaagtagctgggattacaggtgcccgccaccacacctggctaatttttgtatttttaatagagacagggtttcaccactttggccaggctggtctcaaactcctgacctcaagtgatctgcccgcctcggtcccccaaagtgctgggattacaggcgtgagccaccacttctagcctaaactaactttcaagattaggtaaactgaggcacagagaggggcagccttgcccaaggtcttgctcagtcctttcctggggaggccccgggagcttccccatcctgtggtcacgggtccctgtcactcctgccactgttcctacgaggctcccagctgctaccgagctgcctgtggggtcatgaattatgcatgaggcctgcaggctccagtgacaagcctggcctctagaacatgccaaggacactgcctgtccgtcccctgccgggcggcctgacccagcctcttgtgcagagacacctggggctccccggcaagatcccttctaagcattccttcttattttgcagatggggaaactgaggcacggagctggacagtgactcagacaccaggtgaacactggcttttgagggcagggttgggactcgtgggggcagcaatgccagctgggtcatcacagtgaggagtgagctctgactcccaggagggtacataaggtgaggactgtcctagaggaatcagaagatcccaggggaccctcagggatacttcagggaccccaacccccatgtggctgatcacagcccctgcatctatttctcttcaaacccttttcctgcaggagctgcctggagtggagctgagagctcaggtctgggctcagccagtccagagtgcaaatctactgtcccttcctagctgtgtgatcttggcaagtgacttcccctctgggggaggggagggctcagttttcccatctgtgaagtggatcagagctttcctgtcaaggttaggggtcatccagcactgctcctacccactgctatgaactcttatacatgcctaaaaaccccacattccatgccccctcctccaatctagactccctcagctcttgtccctccacctagtccagttctgactctgtggaattgggggcatctgtgtcttgttctgtccccctctactggagctacttgggaccagcactggggctgaattatctcaggggtcctggcatgctcttagcattggagctttcagttcctccttcatcctttctctccttcctctacagggagggactttccccccaccaagcccacactggcaatgactctgtagctcaaacttgcctctctcttcagacaggcactggacggggcctgcaggggtctccacagagaccatcaggatgtcgtattttggggagcatttttgggtaagacccactcttatttaggcgggggatgctggcagggctgtggggacttttatggagatgggaggactgggtgagttgcggttacagccttggacaggtagaggatctgcaagggatggaagttaaagtgggaagagtcaggctgggtttgaatccacacccaccccagacctcacaggccttacaaccttgggcaagtcatagcttgtgtcatagggagaccaagggccagagtgggaacgtctaggcaacctgaagttgccccatgaaaaagtgcagagtcagtgctcaaacccagggccaaactgaacttccaggacccagggtcattccagccagggaacttccacccccttcccatcctggagaattggggggttttcctgacctggcgtctcatggcctgtgcacccctccactgtccaggctggagatcacctcctgtagcccaagggctgctgagtgagacagagttgtttttattcattcatttcctctctccctgccactgtgacctcatccccagccagccctaggagatgctggggtctccaagagaatccatcccagccccagccccaagggaggagtccccagtctgggggacccagagccagcttagacaccttcagccctgcaggaccagggctgaacccagccttgggggtcctagagtaggaaccaggacacagaatcgtgtttgctgtgagaaagcctgggcaaaagaccagagatgtgacattgagtggcaagttcagggaacagggactcctcctgcagagccaggctaacagggtgccacagaggatgggtgaacaggggagggcccaggagtcagggaaggaccaggtcagaaagccccttccccagttgcaggccctgagcttgcagtgaggaagcctgttgctaggcgactggttgcccctggcaacaagccccactcctgcccttgctccctccccagctggggctcctcttgaaagcacttgctttcttaaaggggccgcactcccttgccacctgcaggggtgtgacctccgccctctctccaaaggtcagactccccgatttgcccctgaaaggctgtgtgactccagtgaggggctacccctttctgagctccttttagtactgccgtgtaatggaggtgaccatttgaggatcaaaagtcacctgcattttggaaccccgacagtggcacctacatttattttaaatcctttttaattgtgtgaggcgtgcaggctcgctgcagaaaattcagatcagcaaagagaaaatagaaaccacccccgacttccccacctcacccaaagatatcctggtagagaatggttaagagctttgagttcaggattcgaattgactctgctggaagcccttgagcaaatgactttgcctgcccgaacctctgtttccccatctgggaaaaagggatgaaattcctgcaccgccactcccaccccatgcaccccacacacccccagactcagggaggcctcctgtgacatctgtcatcagttgctagtattgaagccgccatagaagcctggttctttgctgggtggtgctggggagattaagccaaacagggatgccccagtctcattgcgccagggcagggccgaagcatgaagtgtactagggagccatgggggaagtgtgagcaggagagggacataaacaagctctgttacaaagaccacactcttggctgggcgcagtggctcatgcctgtaatcccagcactttgggaggccgagggaggcggatcacctgaggtcaggaattggagaccagcctggccaacatggcaagaccccatctctactaaaaatacaaaaattagccgggcatagtagcatgagcctgtagtcccagctactcgagaggctaaggcaggagaattgcttgaacccgggaggtggaagtcgcagtgagatcgcgccactgcactccagcctgggtgatggagtgagactccgtctaaaaaaaaaaaaaaaaaaaaaagaccacattttggctggcacagaggccaagtctgaagtctagaagttctggtgggagagacagacctgagacagcccctcctaggaccctcggctgccagcccagtccaagagaggcagacgctgctgggggtttgccaggtctgggaaacgggccagcagttggctctgagtcagacccagatgctgctctgggcggtggtgcctggtgcagcctcacccgaggatctcctggggccagcactgtgccagcctcatcccagcaagacccttgggagttgggtgctgttgttgtccccatttgtcacacaaggaaggaaactgaggccagagagacgaagtcaccaacccaaagtgaccctgtacgtataaggagattggacacttgaactttgaaaatataattccaaacacaagaagagaaaatataggtggagcgtggtagctcacgtctgtaatccaaacactttgagaagctgagatggcggatcgcctgagcccaggactttgagaccagcctgggcaacatagcaagaccccgtctctactaaaaatacaaaaaattagctgggtgtggtggcgcgcacctgtggtcccagctacttgggaggctgaggtgggaggatcgcttgagcctgggaggcagaggtttcagtgagccaagatcataccactggactccagcctgggcgacagagcaagaccctgtctcaaaaaaaaaaaaaaaaaaaagccgggtgcggtggctcacacctgtaatcccagcatttgggaggccgaggcaggcggatcacaaggtcaggagatcgagaccatcctggctaacacagtgaaaccccgtctctactaaaaatacaaaaaattagccgggtatggtggcgggcacctgtagtcccagctattgaggaggctgaggcaggagaatggcgtgaacccaggagacagagcttgcagtgagccaagatcgcatcactgcactccaacctgggtgacagagtgagactccgtctcaaaaaaaaaaaagagaaaacgtattcctggcgagctggagggagcaacagtgaagtgggggagggggttgagcagggttagggaagtttctagagcaggtggcaatgatccttgggaagtggaaggatgtggatgggtggaaggagatgcaagctggagagctgatggcgggaatagcctggacaaaatgtggtggtggaaaggcactgcctgtctttgctatttgctgttttgtgggtgaggctaggaagaagctaggagatgaggctggagcagcaattccaggccatggacttggacttcagcatctggtgggcaatagggacccattgatgattctagaatgaagtgtgaccattgggagatttgggcttgaggctgacctgggtctgccccagtcttggcttcggtgtctccattggtgcagcaggaaacgttacctagcagtgacttctggctttaaccttcaggcttctggccaagtgtggtgactcacgcctgtaatctcagcactttgggaggctgagatgggaggattgcttgagtccaggagttcgagaccaaccttggtaacatagtaaggccgtatctctactaaaaataaaaaaaactagccaggcctggtgtcacatggctgtggttccagctacttgggaggctggggtgggaggatctcttgagcccaggaatttgaggctgcagtgagccatgattgtgccgctgcactccagctggggagacagagcgagaccctgtctcaaacatagaaaaatatgtataacattcaagcttccgggtacctgggagggtgaacctggtaggttggaggagggcacaggaaactaccatttatggaaaacccgccaaatgctgccagagggatggcttcactgatgtgtgttgggacttaaatggcatcagatccctccacaagccttctcttccagtgttattataagacctgatttggtgctaaaatgtccccagttccctcagaccccagctgattaccttttttttttttttgagacagagtcttgctctgtcagccaggctggagtgcagtggcgggatctcagctcactgcaacctctgcctccctgcttcaagcaattctcccgcctcagcctcccgagtacttgggactacaggcgcccactgccacgtctggctaatttttgtatctttagtagagacggggtttcaccatgttggccagtctggtcttgaactcttgacctcgagtgatttgcccgcctcagcctcctgaagtgctgggattacacgcatgagacaccacacccatctagtcattgattttaaagttgtaatggtgagttttaagtccaaatctaaaggtgtccaattccaacagcgggcgcagaggaccaggtctccaaggggtggagagaagcgggatcagaaggtgtgtatgaggccgggcgtggtggttcacgcctgtaatcccagcactttgggaggccgaggcaggcagatcagttgaggtcaggagttcaagaccagcttgaccaacatggtgaaaccctgtctatactaaaaatacaaaaatcagccaggtgtggtggcacacgcctgttaaaaaaaaaatcctcatgtttaatctatattggtcttgcttttagccttttcctcagttctattcatattgtttattattttttgttttctgtagatggtcatataatctggtctcaattatttttcttaccttactgcatttgccaacacctctacatcagcattaaatattagccatgatttgaggcattcctgcctcatcctgaaatatgttgtgtctcctgttttgccatctttttttttttttttgcattgggggacagagtcttgctatgtcacccaggctggagtgcaatggcacgatctcagctcactacaacctctgcctcccgggttcaagcgattctcctgcctcagcctccgaatagctggggttataggcatgtgccaccacgcctggctaatttttgtatttttagtagagacggggtttcaccatgttggccagtctggtctcgaactcctgacctcagataatctgcctgcctcggcttcccaaagtgctgggactacaggtgtgaggcaccgcgcccggcctgattaccatttttaatggacagcttagtagtgttcaggcatgatgcccttcccaggtgacagaatctggccggcgttaagatatagttgttgcctcattttttcctactcctttcatgcggcagagggtcccaattttccattgagagtggcagaaaaagttgccctttaacataaatgtctttggggaagaagcataagcaaatttaaaacaaatgctaactattaataactaatgttacgaattagcaaaaactagagtggcctttggggctttggggagcattgacatggattatcttgctgcttgtatcatctccatgtaagaggcagatgtctcccaggctgtagtgtagtgacatgattttggctcattgtaacctccgcctcccgggttcaagtgattctcctgcctcagcttcctgagtagctgggattacaggcacctgccaccatgcttggctaattttgcatttttagtaaacacggggtttcaccattttggccaggctggtctcgaactcaagacctcaagtgatctgcctgcctcagcctcccaaagtgctgggattacaggggtgagccaccgcgcctaacctccctgccccatcttaatgaggagctcctaaaagctcagagggggcagtgacttgcctgggtcacacagtgcagccctggcctcccccaccatgacaaccccagaaattggagtaaagagattttgtgaaggcattcgcaggcaccagggtagaaatactcagttcccagtggcactaacaggtaacagcagaatcatttgtttatttattcaacgaactcaaatgccctttctgtctctcattctgtgctgggctttggtgggtcctgggagagaactcaaacctggaccctaatttgggttctcataggcggaatttccatgttgacaagaacagaaaacacaactacagtgacttaagcaacggggactgtattggcttataagatcaaatgattatgggggaatgtggctttcagggttggtttgatccagcaactcaatttaacacacttttttttttttgtagctagtataaatgggatcactttcttgatttcttttcagctatattttattaatggtgtatagaaacgctactgattttcatgttgatatttgtattttgcaatttaactgaatttgtttatcagttctaggagttttttggtggtgtgtttaggccttcctatacataagttcatgttgcaaagagagacaatttgacttcttttcatgtatatacatatatatatatatatatatacacacacacttcccccccgccctgagacggagtcttcctctgttgcccagagctggagtgcaatggcgtgatctcggctcactgcaacctctgcctcccacgttcaagcaattctcctgcctcggcctcccaagtagctgggattacaggggtgcgccaccatgcctggctaatttttgtatttttagtagagacagggtttctccatgctggccaggctgatcccaaactcctgacctcatggtccgcccgcctcagcctcccaaggtgctaggattacaggcgtgacccactccaatttatttttatttttatttcattcattcattcattcattcattcatttattttgagacagtcttgctctgatacccaggctggagtgcagtggtaggatctcagctcactgcaacctctgcctcctgggctcaagcaatcctcctgcctcagtctcccaagtagctgggattacaggcacgcgccaccacgcctggctaatttttgtatttttagtagagacggagttttgccatgttggccaggctggtctcgaactcctgacctcaagtgaaccacccaccttggcttctcaaagtgttgggattacgggcgtgagccaccgtgcccagctcaacacacttttttttttttttaaatataaaagccctctggttcagcttctttctaaggttcacggtttccatttgacttccagtatcccctgtggccacataattcctcatttatggaaagacacaaagagaaaaggggaggagactgagacagaaacggcagagagactcagaaaaacggagagaaagacagagacacaaagacagaaggagacaaagacacagaacaaatgagattcctccccagcaactataggacaaaaagaaaatcccaggcttctctctgattggacaaatttaaggtccatagacaatccctatggcccaggggaaatgcagcaagctgattcgctcaggcccgaacaagtccctacagccaaggggatggacttctgctccttggccacgcccccgttgctaagcaactatgatgttctctccatcctttctcaatctctattcccatcccctgcagggcgagaaaaatcatggctttgaggtcctgtaccacagcgtgaagcaggggcccatctccaccaaggagctggcggacttcatccgggagaggtgaggtccccaagccccatccaccagaggccacgcccaccatcctgtagtcacgcccacctaatggctacgccctgcatggtcaggggctagaaccctggggattccaggaaccagaggggctcgaaaatcctggaaatgaccgattctcaacccggtcaggcccatatctccttttaaacaacaatcacctgatttcgaaagctcccctcctcaaaagaggatgatataacctactcaaggttggaatttttttttttggagacaagatcttgctttgttgcccaggctagagtgcagtgacccaatcatagctcactgcagcctcgaactcctgagttcaagagatcctcctacctcagctcccgagtagctgggactataggcatgtaccaccacatctggcttttttttttttttttttttttaaacagagttttgctcttgttgcccaggctagagtgcaatggtgcagtctcggctcactgtaacctctgcctcccgggttccagcaattctcctgcctcagcctcccaagtagctgagactacaggtgcctgccaccacgtctggctaatttttttatttttagtagagacgaggtttcactatgttggccaggcgggtctcaaactcctgacctcaggcgatccgcccgcctcagcctccaaaagtggtggaattacagatgtaagccactgcactctgcctttttttttttttttctttttggagacagagtctcactttgttgcccagggtgatctgatcatagctcactgcagcctcgacctaccgggcccaagcgatcctcccacctcaggatcctgagtagctgggactacaggcatgcaccaccacacctatctaagttaaaaaaaattttttttgtagagaaggagtctcattatattgcccagggtggtctcgaacccctgggttccagtgatcctcctgcctcggcctcccaaagtgctgggattacaggcatgagtcaccatgcccagcctactactgttgttaataaaatatattacgtaagaaaaaatcttctatgaattttcaaaacatccctcagagtgttgtgtcatccccccattatggaaagccactgctaaggtgtttgagatggggaaactgaggcccagaggagcagtgcctctctcaagggtgtctgaaagcttcttcatctttttttttttttgcgatggagtcttgctttgtcacccaagctggagtgcagtggcacgatctcagctcaccgcaacctccacctcctaggttcaagcgattttcatgcctcaacttccccagtagctgggaattacaggcatgcaccaccacacctggctaatttttgtatttttagtagagacagggtttcaccaagttggccaggctggtcttgaactcctaacctcaggtgatccgtccgcctcggcctcccagagtgctgggattacaggcgtgaaccactgcgcccgggcagtttctccatctttacctcattctcctccccagggccaccatcgaggagacctactcgaaggcgatggcgaaactctccaagctggccagcaacgggacccccatggggtgagtggggtaggggtcaccaacatggggacattgggagcctcctccttggtggacatctcttcacactcggtgcatgtagaatagagtgtcatccacctcgattatggggctatttggatagagggatgtatatcattcattcacacactagctcattcattcattccacaaatattttttgagtgccttctgtgtgccaagcaccagcagcaacccagacagataaaaccccagccaccttcatgcaatgtacatctgggctgtgtgagaagagagatgttaaatacaaacaaaaacattttttttctgaggtgaaaagtgctgggaagggggccaggtgcggtggctcatgcctgtactcccagcactttgggaggctgaagtgggcggatcaccggaggtcaggagttcaagaccagcctgggcaacatggtgaaactcctctctactaaaaatacaaaattagtcgagtgtggtggcgggtgcctgtaatcccagctactcaggaggctgagtcaggagaatcgcttgaacccaggaggcggaggttgcagtgagccgagattgtgccactgcactccagcctgggcaataagagcgaaaactctgttttgaaaaaaaaaaaaaaaaaagtgctgggaagggaatgagataggagtgtgagagatcgggcactttctctggggtgggcccgacctccctgaactgagaccttaatagaaaggggcaggccatggggatgtctgagggacagagacccgggcaagtggctcagccagtgcgaaggccctgagttgacaggcgtggcatgtttacggaagagtgaggaggctggcctggctgcagggcttgggcaacgtggaaaggaagtaggaggggagatggcagggtgaggcctcaggggcctgacacacaaatgactttgcatgaaccttgtgcccgggcgcggtggctcaagcctttaatcccagcattttgggaagctgaggtgggaggatcacttgaggccaaaagttcgagaccagcctgggcaacatggagaaacccctgtctctactaaaaatgcaaaaattagccgggcatggtggcatgtgcctgcagtcccagctatttaggaggctgaggcaggaggatggcttgaacccaggtgatggaggctgcagtgagccatgattgtaccactgcacttcagcctgggtgacagagccagaccatgcctcaaaaaaaaacaaaaataaaaacaaaacacataatgtggtcccccgatggcatttgcagttttctttgtggctgctatgaggcaaaagttctgtggggcaggcagaagtggaggcagcaggaggagaaggtggagggaggctggatggggcttctgctgagtggggcaggccaaattgactcgattggggcatgtggtgtcttagtcactcttttttttttttttttttttttttgagacagagtctcactctgtcgcccaggctggagtgcagtggcgcgatcttggctcactgcaagctccgcctcctgggttcacgccattctcctgcctcagcctcccgagtagctgggactacaggtgcccaccaccacgcccggctaattttttgtatttttagtagagacggggtttcaccatgttagccaggatgctctctcaatctcctgaccttgtgatctgcccacctcagcctcccaaagtgctgggattacaggcgtgaaccatttttttttttttttttgagatggagtctcgctgtgtcacccaggctggagtgcagtggtgtgatctcggctcgctgcaagctccacctcccgggttcaagcgattcttctgccacacccagctaatttttgtattttaagtacagacgggggtttcaccatgttgctcaggctggtctggaactcctgacctcaagtgacctgctcgactcggtctcccaaagtgctgggattaccagggcctgcgtttaaattccagctctaatgttgatttgttgaggggccttgggaggagctatagagctccctatgcctcagtttccccatctgtcacaggcccgcctcttacagctgccatggagattatatgaattagtattcattcatgtttagcagggctcagcgtgcagcacatacctgagccagtgccagcgctgtcccggggtggggtgagcctgatgaaccctgggtgtgaccttgcccgcccccaggaccttcgccccgctctgggaggtcttccgcgtctcctcggacaagctggcgctgtgccacctggaactgacacggaagttacaggatctcatcaaggacgttctccgctacggcgaggaacagctcaagacccacaagaaggtgtgtgtcgtgggcgccgcccagcggctgggtgggtgtggaacaccggcagctcacaggaccccagatcttctggggctttataacctgcggatgtccgcctccgagaattccgttaattccacaacgtcaagcccagggtcttacggacctgagcgttgttgaatttcaaacttgcaaaattccagaccaggagttagcacactgtggcccacgggccaaatcccgcccaccccccaccaatgtttgtacagctaagaagggttttttttttttctgcttgtttgtttttaagagacagggtctcactctgtcacccacatgcagtggcgtgatcagagctccctgcagcctcaaacacttgggctcaagcgaacctcctgcctcagcccccacagaatagctgggactacgttgcacgccaccatgcctggctaatttttaaaaaatgtttgggcctggcgtagtgactcatgcctataatcccagcactttgggaggctgaggcaggaggatggctggagcccaggatcctacaggagtttgagaccagcctgggcaacatagggagaccccatctttaccaaaaaaaaaaaaacacccaaaactacccaggcatgatggcacatgccggtagtcccagctactcaggaggctgaggtgggaggatcacttgagcatgggaggtcgaggctgcagtgagccatgatcatgccactgcactccagcctaggcaacagagaaagactgtctaaaaaaaaaaaaaaaaaaaacaagagagagagatgggttatcactggtttttacattattaaagggttagaaaaaaatctaaagaaaaataaaatttcaccacatgtgaaaattgtatgacagtcacatatcagtgccagtaaataaagttttattggcacagagccatgcccattgatgtgcctgtcatctgtggctgtttggcactgcagcgacagattcaagtgtttgtatcaagccaaacacatttgctatctgtccctttacagaaaacatttgccaacagctgttctaaagcattggaagttacagatattcatatttactatttttacactcttataaacctagaatcagaagaaccatcttagactcttagaattccacaatatccaaagcttataattgtagaatcatagatgcattgtctttacagagttccaaaatctgcatgtttttatgtcttgtttaaaaagggggttggtaatactttgtttttgttttgttttgttttgtttttttgagatggagacttgctctgttgcccaggctggagtgcagtgtgcacaatctcagctcactgcaatctccatctcttgggttcaagcaattctcctgcctcagcctcccaggtagttgggattacaggtgtgctggtgcacgcctggctaattttttgtatttttagtagagacagtgtttcaccatgttggccaggctggtcttgaattcctgacctcaggtgatctgcccgcctcagccttccaaagtgttgggattacaggtgtgagccaccgcgcctggctttgctgatttttaaattttttgtatagaagggatcttgctagccaggagcgatggctcatgcctgtaatcccagcactttgggaagttgaggcaggcatatcacttgaagtcaggagttccagaccagcctggccaacatggtgaaaccctgtctatactaaaaacacaaaaattagccagacgtggtggcacacacacctgtaatcccagctactcaggaggctgagacaggagaatgacttgagcctgggaggtggaggttgcagtcagttgagatcgcgacacaccactccagcccgggcaacagagtgagactctgtctcaaaaacaaaacaaggcaaaaaaaaaaaaaaggagagagagaaggggtcctgctgtgttgcccaggctggtcaaacatctaacatatctgcctcagccttccaaaatgttggcattacaggcatgggtcactgtgcctggccaggagtgaatttttaagtggtaaaagcaggccaggcgtggtgtgcatgcctgtagtcccagctacttgggaggctgagctgaggtgtgagaattgcttgagcctaagagttagagaccagtttgggcaacacagtgagaccccatctcttaaaaaaaaaagctgggcacagtgacttatgtctgtaatcccagcactttgggaggctgaggcgggcagatcacctgaagtcgggagttcaagaccagcctggccaaaatggtgaaaccctgtctctactaaaaatacaaaattagccgggcatggtggtgcatgcttgtaatcccagctacttgggaggctgaggcaggagaatcgcttaaacccgggaggcggaggttgcagggagctgagattgtgccactgcactccagcctgggtgaaagagcaagactccgcctcaaaaaaaaaaaaaaaaaaaaggcctggcacggtggctcaagcctgtaatcccagcactttgggagtccgaggcaggcagatcacgaggtcaggagatcgagaccatcctgactaacacggtgaaaccccgtctctactaaaaatacaaaagaaaaattagccgggcgtggtggcggcgcctgtagtctcagctactcaggaggctgaggcaggagaatggcgtgaacccgggaggcggagcttgcagtgagccaagatcgcgccactgcactccagcctgggtgacacagcgagacttcgtctcaaacacacacacacacacacacacacacacacacacacacacacacacacacacaaaacggtgagttaagcaacacagtctgccactgtttgtcataaaacttgggttagaacaagcatctttatccatatgcggattatttctagagaagtatcacagtaataattggggacttctaggctggagggcccatatatgggaggctttttcctggcttacctcttacaactttctgaaatatgaaccatgtgtaaatagtacttttttttaaagttaaaaatgttttgaaatgaaaaacgtacaggccgggcgtagtggctcacacctgtaatcccaacactttgggaggctgaggcaggtggattgcttgagtgtaggagtttgagaccagcctgggcaacatagcaagaccccattgctattaaaacacacacacagaggccgggcgtggtggctcacacctgtaatgccagcactttgggaggccaaggtgggcagatcacctgaggtcaggagttagagaccagcctggccaacatggtgaaaccccgtctccactaaaaatacaaaaaattatctgggtgtgatggtgagcacctgtaatctcagctacttgggaggctgaggcaggagaattgcttgaaaccgggaggcagagattgcagtgagtcgagatcgtgccactgcactccagcctggacaacaagagcgaaactctgtctaaaaaaaaccaaaccaaaacacacacacacacatagaaaaagactgtggagctgacatcacgtggagtgtttgggaggtcaggaatttcacagtctacccatgaaatcccctcctaccccgcagtgcaaggaggaagtggtgagcaccttggatgctgtgcaggtactctcgggcgtcagccagctcctgcccaagtcccgcgagaactacctgaaccgttgcatggaccaggagcggctgcggagggagagtaccagccagaaggagatggacaaggtgggctcacagtgggggggttctgaggaatttgccgcggggcggaggggctgcctgatcagagagtggaaacacatcccagagcgacggtcctggaacctgtgggtgatcacaccctgggtaccccgaggagttcacctgccaggtgatggggcctgggggaggccccctgagtatcgccctcccatccccgtttcctccctgtgctttgtaggcggagactaaaaccaagaaggcggcagagagcctgcggcgctcagtggaaaaatacaactcagcccgagctgactttgagcagaagatgctggactcagccctggtaagaaccaggcatctgtacctttaagacccacacatgcctttgccctggaggttatggactgcagaaatcccaggcagggtgtggtggctcacacctgtaatcccagcactttgggaggccgaggcgggaggatcacctgaggtcaggagtttgagaccagcctggccaacatggcgaaagcctgtctctactaaaaatacaaaattagccgggcgtagtggcaggtgcctgtaatcccagctactcaggaggctgaggcgggagaatcacttgaaccagaaggcggaggttgcagtgagccaagatcgagccattgtactccaggttaggtgatagagtggaaccctgtctcgaaaaaataaaataaattcaagcagattggaatctgaggattaggaatcagaacttttttcaagttacaagtgatagaagccttcattcaaaccgacaggtgtatataaaaaaaaaaaagaaaagaaaagaaaaaggctgggcgcggtggctcatgcctgtaatcccagcactttgggaggccgaggcaggtggatcacgaggtcaggagatcgagactatcctggctaacacggtgaaaccccctctctactaaaaatacaaaaaaattagccgggcgtggtggtgggtgcctgtagtcccagctgctcaggaggctgaggccggagaatggcgagaacccaggaggcggagcttgcagtgagccgagattgcgccactgcactccagcctgggcgacagagcgagactctgtctcaaaaaaataaaaaataaaataaaaaataaaatttaaaaaaactgacaagctcagggaactgtaaagttttatttttgagttgtggaggtttcagtcatagctgaatccatgtgctcaaatagtgctggcaggaaattgtgaatttctgcttcttttatttttttgagatgggatctctctgtcactcaggctggagtgcagtggcgtgatctcagctcactgcaacctccgcctcctgggctcaagtgattctcctgcctcagcctccctagtagttgggattacaggcacgtgccaccacacccagctaatttttgtatttttagtagaaacggtttcaccatgttgcccagactggtcttgaattcctgacctcagatgatccacctgccttggcctcccaaagtgctgggattacaggcatgatacaccacagctgaccactatttctgcttcttaagtctgtttttctctctggggacatcactcccacacagacatccccttgtgtgtgtgtgtgtgtgcatgtgtgtgcaagcatgcacatgtgtgcatcaaactgggcaccagcaacccccacttacatcccatcagcacattggctcaggaatggaagtgccttttcctgtagagtcaatgaaagtcctagggcagactctcattggcccttccccaaatcaatcactgagccaagggcttagggtattctgattggtcaggctgagtcatatggccacttcttcttggccctgacctcctttccacctgcctctgccctcctgcttcagcgcttccaagccatggaggagacacacctgaggcacatgaaggcactgctgggctcatatgctcactcggtggaggacacgcacgtgcagattgggcaggtgagttgggcaggtgtgaggaatgaggctggggtcactgctgggcaaaggggccttgaccagttacacaccccgcccacccggcacaggtgcatgaggaatttaagcagaacatcgagaacgtcagcgtggagatgctactcaggaagtttgcagagagtaagggcacaggccgggagaagcctggtgagtcagggcagccattgggggtcgggcttcggggccacagctgcagacaggcatgtgccaccatgcccagctaattttttttttatttttttatttttaatagagacgaggtttcaccatgttggccaggctggtctcgaactcttgacctcaggtgatctgcctgcctcggcctcccaaagtgctgggattacaggcgtgagccactgcacatggccaggccttggtttcttcatgggaaaaatgggctgctgacaagtccagctctccagcctgatcttatgtgtaaatgtctttgaaccagatcccagaggagccttgaatgccaggcttggctgatcagacttcacccccagggcctaagggagccattgagggttgttgagcaaaagaacaatttgggaatgcgcagatgcaggactgggaaggagttaagagcaaaagttttagagtgagacgtgggtttgagtcttttcttcatcgcttgctgtgtgacctaggacctgtgctttgacttctctgagcctcagtttcctcatctgtaaagtgaggatgtaataatgttgcaacattcagtgatttcatgcaggtaaagggcaaagggtgtgccaggcacacagtaggcactcactaaatgctggtatacagttacgtcctcaagtcttgttaactagcaaaacctgttctttctccctcctgtcgctctggctcaggcctggctcaggtctcccctccctgcatggggccccactcttgcccttcacaggccccagatctgttttgtcctcctcctgctcacacaccttccatggctccccattgttcttgggagagagttcccactccttatcctgtcactcaaagcccagcccactgcacagacgcatggtccattccccgacccaacccaagttccagccacaaatgctggaagtatgtagaagtagctcatgtcaccccctgcggtggcactgccctgctggaaccagaccagccccttggtccatcccacttctgatgatgtggggctggttcttgtccgggaacctgatggaccttgagttcagatccaggtgccattttgtggccaaaagtgtactaccctttccaagcgcagtctccccaccctcaatttagtttctttctctctctctctctcttttttttttttttttaatttttttgaggcagagtcttgctctgtcacccaggctggagtgcagtggtgcagtctcggctcactgcaacctccgcctcctgggttcaagcgattctcctgcctcagcctccccagtagctgggattacaggcgcctgccaccatgtccggcttttttgtaattttagcagagacagggtttcaccatggtggccaggctggtcttgaactcctgacctcaggtgatccgcccgccttagcctcccaaagtgctgggattacaggcatgggccaccgtgcccagcccctcaattgagtttccgtctcctgtctcaggacctctggacttcgaggcatacagtgcggctgccctgcaggaaggcaagtacgtctgggcctggatgcccaggctggaccatgggggtgagggaggctgatctgaatgtgaaaggaggctcacagtgctcaggtgccccccaatctatcctcagcgatgaaacgtttgcggggagccaaggcctttcgccttccaggactaagccggcgggagcgggagccagagccacctgcagctgtgtgaggaagcacccctgcccggtctggcccaggctagaccgagatcccctcccctgcccaggctatcccagaagtcccctcctaggatagcccaggagtatccatattccaggctggaccaggattccctctacctgagctagaccaggagtacctctgcccccggctagctcaatattaccgctgcccaagctagtccagaattcttccttttgctaggttaggccaggaattgcctgtcccagagtaacgtagcatcttccctgcccaagctggcccaggattgttctgtttgccaaggctagccccgactttccctatcttcacaaggcagcccttcaaatgagttccaggattccttccctcccaggctgtttgagaacactctctactcagctaacttcagattcaaccccctccccaagcaagccccatggtcccaccgcctctagggctagctcagggcagtatcacagtctgggagctgccccagcttccatgtccagtgttgggggctgacagggggcaccagatgggctgcggaagctgacaccaacatctcttcctccatccccagagatttcctggagcccgattcaggggtgagtgatgtgggaggggtcaggctgggctacaagtggaaggagtttgatcccactcttggctcctagagtcccgatccctactggaaactaaagagccgagattgaggggcgggctggagcctgggggctgggttcatatcccacctcagctgcaaagtcccatggactacgtgggtgtgaataatgtccctgccgaagctcagtttgtcccaggaacctgcccacacacccagggaagacagtcgttgccatcagggttggttttgaggtctgagtcaaggcctgggggcagggcggggggcggttggcagggtgagatggaaggttcgatagtggggcgcctgactcactgctgccccctgactcccctagacatgtccagaggtggatgaagaaggtttcactgtccggcctgatgtgacccagaacaatatccttctggcaccccctgggggcagttgttggcacagcaaggacaaaattctccgtaataaccagtccaccttcagcagtcctctctgtgtacatcctggagagagtctcctttgtggatgaagccaacctaaatgtaaacacccactctatggggtcagcactgggcaagagggagagagaaaaggagatctagcagggcttcctggaggagggggcaccagtgttggggttttgcagccgaataggagtttgccagttagttctgggcatgcttgtgcaaaggcttctcggggggggtgggagtgctggtgggacatggtgtcaggactgaaggtggcgcgtggtgagcgatgggattgggcaggacctcgaagggtttgagcagggagggacgaggctggattggagagctgactgggggaaagcttgtgttgggattggcttggaccttgactgcagcccacgcacggccgagccctcccgtttctcgtccagcgactccgacttcgacgatgaagagccccgcaagttctatgtgcacatcaagcctgccccggcccgggctccagcctgcagccccgaggcagcagcggcacagctcagggccaccgcgggcagcctcatccttcctcctggcccaggggtgaggcgtgggaggggtgccctgggtgttgctagagaggctggctggatgcattcgtgtgtgatgttgcccactttgtccacagggcaccatgaaacgccattcttcacgtgagtagcctttggtcttcagagtggggaggatcctaaggaagggaggctatgggtttgggcttgaatcataactccgttttgtaactttgggcaggctgcttaaccacactgaccttcagtctccttttctgtaaaatgaggtcattatgaaattaagtgagagctgaaaggggtagctggggccaggagaagctagcatctggagacaggctcgcttaggcttgaatccatgtctgcctgatttgctgatcaccttgggcaactggctggacacccccgagcctcggtcccttggtctgtggagtggggagcattgcaggcagggtgacaagaaggctgaaggaggtgcatctcttgtaggggacgctgctgggaaaccccagagacctcggtctgcccccagaaccagcaggtgggttccacacgagtgggcaggtgggggctgtccccacctcctccctccacctccccatgtctccgcctggtgttctcttgtcccggctgggagttgacgtcatgctggggtttttttgtttttgtttttgttttgagacagagtctcactctgtcacccaggctggagtgcgatttcagctcactgcaacctccacctcctgagttcaagcgattttcatgcctcagcctcctaagtagctgagattacaggcacccaccaccacgcccagctaacttttgtatttttagtagagacagggtttcaccatgttggcccggctggtctcgaactcctgacctcaagtgatctgcccacctcggcttgccaaagtgctgggattacaggcatgagcccttgtgcctggcccatgctggcttttgagggaccatttagtcattcatttgatgaacatttattgagtgcctgctgtgtacctgtgctgttctagggtctgggttctgagacaggtctcccttctcagagtcacattctagtgactccagattttaagaatagcaaatagggccaggcgtggcggctcacgcctgtaattccagcactttgggaggccaaggcaggcggatcacctgaggtcgagagttcgagaccagcctgaccaacataaagaaaccccatctctactaaaaatacagcattagccaggcatggtggcacatgcctgtaatcccagctattcgagagggtgaggcaggagaatcgcttgaacctgggaggcggagcttgcagtaagccactgttgtgccattgcattccagcctgggcagcaagaggaaactccgtctcaaaaaaaaaaaaaaaaaaaaaaaaaaagcaaataagttagagcatattcgatacttctaagtgctacgaagaaactaaagcagatgacgcgaagacaggaggaggtgacttcccttgaggtggggttgggaacctccctgagggggtgacttggagctaagccccaaagaggagctaggaggtgactgtgaagagagctggggaaatggaactccagactgggaacaggctgcacacagtggctcacacctgcaatcccagcactggccaaagcagccagatcacttgaggtcaggagtttgggatcaggctggccagcatggtaaaaccccgtctctgctaaaaatacaaaaattagccgggcatggtggcaggtgcctgtaatcccagctactctggaggctgaggcaggagaatcgcttgaacgcaggaagcggaggttgcagcaagctgagatcgtgccactgcactgcagcctggccgacagagcaagactccgtctcaaaaaaaaaaaagactgggaacagcatgtgcaaaggccccagggtgggatgaggcttgggaaaaatagaagcagccctcttggcctcaccctctctagctgtgcagagagattgcagtcagaggagcaggtgtccaagaacctctttgggccgcccctggagtcagcctttgaccacgaagattttacaggtgatggggataagggattggagggcatgggtgtggccggagggaggttgggtggggccattgcagagttaggccaatgaggtcccctggaagccaggctggagggaggactagtccgtgtaggggtgggcggggccagagtgcgcgtgggaggggccatagatagggtggggccttggccagtgggcggtgactgagtggatgggccggacatttgtggagagggaagtcaccagaaggtgtagccttgggggcgtgcacaaggactttgaatgggggcccccctgaccttccctcgacgtggccgtggcctgcaggaggatgggcagggactctgagtgggcgagggtcggagctgaccgcccgcttccctccccaaggctctagcagcctgggcttcacctccagcccctcccctttctcctcctcgtcgcccgaaaacgtggaggattccggcctggactctccgtcccacgcggcacctggcccctccccagattcctgggtcccccgcccaggcaccccgcagagcccgcccagctgtagggcgccacccccagaggccaggggtatccgggcaccgcctctgccagactcgccgcagcccctcgcctcgtctccaggcccctgggggctggaggccttggccggaggaggtgagtccagcgggcctgggcctgagagttgctggaaccctgggcgggggattgagcgcctgctttgggcagggcctgatcaggctgctggagacacagccaggaccaggcaggcagaacctcccaccgttgcagggacaacaatgagatggacatttagcaaggcaggcggtagcgggtgccaggtgggggccctccctgaggaagggacatctgagctgagatttgagggaggtgaggacagaaccacgtggacatgaggggaaaggcgtgctgggcagagggcacagcccctgcaaaggtcctggggcaggagcgcgctaggcctgtctgaagaacagcaaggaggtctgcctgctggaacggggtgatcacggaaggaggaagaagagaaggcagggaccaggaagggcctgatgggcccagggagggcttgtgaatgttaccctgagtaacgctgagggccatgagcaggggaggggcgggacctgactcaggggtcacaggctccctctggcagcttcgggagtgagggcagaaaccagagactggggaggcaaccagggaggcaagtaggcgatgggggtaagggtggcagtgggagaagcaggtggaaaggtcgctgcaggggagagttcggaggagtaaggatggggaaggagcggagtcaagggagggaggaggatggggaaggagcggagtcaagggaaggaggaggatggggaaggagcggagtcaagggagggaggaggatggggaaggggcggagtcaagggagggaggaggatggggaagggacagtcaagggagggaggaggatggggaaggggcggagacaagggagggaggaggatggggaaggggtggagtcagggaggggtgggggacgtcgaggctgtgcctttaggtgtcaggtgcacagtggaccctgagtgtggggaaggtcaggtcagagcaccccctccttgaagacgtcatcaaaacaggaggagcagccgcccagggagagcagaggagaggacagccggggagcccagaggggttggagacaggaggacagcaggagatggggggagagcggcgggatgggctcctgggggctgtctgaggagaatgggaagcccccgagtcagagggactgtgggctgtgaccacccgaggtccccagtagtgtcaacaagggctcctggcaccctccataggaaagggccaggctggagcccgttcaagggagagctgagtgggtggagaccacagagtgggggcagaagaagctcttttttttttttttttttttgagagggagttttgctcttgttgcccgggctggagtgcagtggtgtgatcttggctcactgcaacctctgcctcccaggttcaaacagttttctgcctcagcctcccaagtagctgggactacaggtgcgtaccgccacacgtggctaatttttgtatttttagtagagatggggtttcaccatgttggacaggctggtctcgaactcctgacctcaggtgatctgcctgcctcggcctcccaaagtgttgagattacaggcgtgagccaccgcacccggcctgagtagaggctcttatccaaccctgcaaattctgcccccccaggggacattgtcagtgtctggagacatttttggttgtcaccaccaggcaggagtggtgctcctggcattcagtgggtggaggcctgggttgctgctcagcaccctacagtgcacagggcagcccccgcccccgagaatggtccagcccccaaatatccacagtgctgaggctgagaaagtcgggtagagcggggagcacagcttggggtacaggtgagaggggaggtaggtgggaggggaggttggcaagcaagggagcacgttcatagatggaacagaaccaggaccctgaggaagcaggagagggaggggagcttgggtgttaaaggcatgagactcagacacagaccacagtaggtggctgcagtcaggttctcggaaagggtagaggtcacaaaatggctgaatgttggctaaaaatcctctgctgaaccccccttacagcatgcctgcgtcttaagccttcagtgcttgcttgcatacccccagtgatggggagctcaccccttattgggccaccattctggtgtctgggagggttgggggtgtggacagtatctgcagtcctgtctggcaccttttctgcaacaccaggacttcagacccattgggggtctctgcagaaaagcccacctcctaagattttggctgagtttgtgcccctggggaggccccagaggccccgggcagcatctcagcagtgcctctttgtactcgctcctagacctgatgcctgcacctgctgaccccacagccagggagggcctggcagccccacccaggagacttcgctctaggaaggtgtcctgccctctcacacgtagcaatggggacctggtaggtgagggggcgtggcaggagctggactgggggtcgcgtctggggtccgcttttgggcactggtcctggggcactcacagccaagattgtctctttcccttccagtctcgttccctgagcccctccccactgggctcttcagccgccagcactgccttggaacggcccagcttcttatcccagacaggacacggtatgtgagggcggtcctgggcctggctttgggcctcagtgtcaccttctctggtctgggtgggtggcttctctgttggcagaggtgtggttgggcggagggagtctcgagcctggagcctatattcacactgtctatccgttgttccccattccctctccaccacccccaggagtctcccggggtccgagccctgtggtcctgggctcccaggatgccctgcccatagccacagccttcacagagtatgtccacgcctacttccgtggccacagccccaggtacccagtgatgggcagacagggcccgtgggaagtctgtgttgggggagtccagcagggacagctttcagatgtgcttcatggtctgtcttatagtgaaagggccttgaacactgagccaagtgaccaggcccctgtcctgagggcagtggagccataggagggcctttttttttttttttttttttttttttttgagacagagtttcgctcttgctgcccaggctggagtgtgcagtggtgcaatctcgcaatctcagctcactgcaacctctgcctcccgggttcaagcaattctcctgtctcagcctcccgagtagctggaactacagatgcgtgccactgcacccgactaaattattgtgctttttgtttgtttatttgtttgtttgtttgttttgagacagggtctcactctgttgcccaggctggagtgtagtggcgtgatctcagttcactgccacctctgcctcctgggttcaagagattctcctgcctcagcctcccgagtaattctgggattacaggcacatgccaccacaccctgctgattttgtgtctttagtagagacagggtttcaccatgttggccaggctggtctcgaactcctggcctcaagtaatccagctgcctcagcctcccaaggtgctgggaggatagacatgagccactgtgcccagccataggagagcatttaagcagggctatgcattgctgtagacgccaaggctgccgtgggcattaagatgaagggagtaatactagaagttaggcccagtaagtgggtaagggcgtgggttagggacaagcggagtgcagggatatatattggggtggccttcagcagaaaagatctgaaagtcaaaccatgaagaagaggagagtgtcagatcaaaaacccaagcaaaggatagctaaaaaactgaacattttaatttgagcttcctggtggcctaggagaaaagagaactagggatggagatgttcctgcctccttcagcccagggtggattcttcctgtccaggcaggaatgaaagaggaggttgggggaaaggatacgggggatcatcagggccatcctcctagatccgaggagtctggggagccacaggcaccagtgaaaccaagagaaggggaaggatgaggcaccaggcagagccctaagccaacacccagtcccctcatcctccctagctgcctggctcgagtaactggggagctgaccatgaccttccctgctggcatcgtgcgtgtgttcagcgggaccccaccaccacctgtcctcagcttccggcttgtacacacaaccgctattgagcacttccagcccaacgccgatctgctgttcaggtactatggaggggcagtgggagagggcctcggaggctgctggggatcaggcttccggactctgagttccctctctgcttcctgggattttttcttttcttttttttttgtagagacggagtcttgctctgtcgcccaggctggagtgcaatggcgtcatctcggctcactgcaactccgcctcccgggttcaagcaattctcctgcctcagcctcccaagtagctgggattacaggcacgtgccactacacccagctaatttctttcgtattttagtagagacagggtttcatcatgttgcccaggctggtctcaaactcctgagctcaggcaatccgcccgccttggcctcccaaagtgctaggattacaggcgtgagctaccacacccggcttgattttttttttttaattattatttttttgagatggagttttgctcttgttgcccaggctggagtgcagtggcgtgatctcggctcactgcaagctccgccttccggattcaagtgattctcttgcctcagccacctgagtagctgggattacaggcatgtgccaccatgcctggctgatttttgtatttttagtagagatggggttgcaccatgttggtcaagctggtcttaaactcctgacctcaggtgatccacccgtctcagcctcccaaagtgctgggattacaagcatgagccaccacacccagccacctcctgggatttgctgtgtggcgtggggcaagtaacttgccctctctgacccttgttttccatccctcctttactgcccgcaccacaaccacccaggtagggctttgctgggcccagggtgggccaggaaattgcatctttaggaaggggtagattgaatgctgggagccctgggagggcatgtcccgaggattggggtgatcagtccgggtctctgcagtgacccctcccagagtgaccctgagaccaaagacttctggctcaacatggcagctctgaccgaagccctgcagcgccaggcagagcagaaccccactgcctcctactacaacgtggtgctgctgcgataccaggtgcgccacccgcatggggccgggaggaggtggtggagtgggggacacggtgagccggcagcagacatggaggcgcctgcgtgttggccaggctggtctcgaattcctgacctcaagagatccaatctgtgagagccgatgagctggagggagtaggcagtgtgggtcgggaatgaacggtggaggagtaggcagtgtggaagagcgtgcatcccctgttgcagatagtatgtttatgtgaactagaagcagcccagccccggaaccttacacttgaacttccctgggagactttgttagaatgaggcgctctcctgccccctgctggaaacctggtgtaatacagcctctcatccatcaaatctccctgtgactggacccccttggggcggtgcgtgcatcgcagggtcaaggtggttgaatagcgcatggtgtggcaagacaggatggcccaagctgtgtcctctctctcattctcattcttcctagttctcccgcccgggtccccagtctgtgcctctgcagctcagtgcccactggcagtgtggagccaccctcacccaggtctcagtggagtacggctaccggcccggtgccacggctgtgcccacaccactcacgaacgtccagatcctgctgcctgtgggggagcctgtgaccaacgtccgcttgcagccggctgccacctggtgagggcttgcgggaggccaaggaaaactcagcagtttcccccataaccccagaccttctccctgatgcattgattaaagggtgcaccctcggcctgaccgttaactgtgagcccaccctgcttagcactaagggtgatgttatgagtgccaggtgcagtggctcatgcctgtaattgcagtgctttgggaggctgaggtgggaggatcacttaaggccaggagtttgagaccagcctgggcaatatggtgagatctcatctctacaaaaaatattttgtttatttatttatttatttaatttatttactttgagatgaagtctcgctctgtcgtgcaggttggagtgcagtggcacgatctcagctcactgcaatctccgcctcccgggttcaagcgattttctctgcctcagcctcccggatagctgggattacaggtgcctgctaccacacccagctgatttttgtgtttttttagtagacatgaggtttcaccatgttggtcaggcttgtctcgaactgctgacctcaggtgatccacccgcctcggcctcccaaaggactgcgattataggcatgaaccactgcacccagccttacaaaaaaatattttaaaaagtagtcaggccgggtgcggtggctcacacctgcaatcccagcactttgggaggccgagatgggcagatcacgaggtcaggagatcgagaccatcctggttaatatggtgaaaccccgtctctactaaaaatacaaaaaaaaaatccgggcatggtggcgggtgcctgtagtcccagctacttgggaggctgaggtgggagaatggcgtgaacccgggaggtggaggttgcagtgagctgagatcatgccactgcactccagcctgggcaacagagtgagactccgtctcaaaaaaaaaaaaaaatagtagtggtagtgtgctcttgtagtcccagctactcgggaggctgagacagaaggatcacttgagcccaggagttgaggcttcaaggagttaccctgggtgacaactgtctcttaaaaaacaaaaatttaaaaaaaaaaaagtctgttgtgaagaagccagacttataggacagaatgcgtcatctaaaagtgctgcaaggaagccgggcatggtggcttatgcctgtaatcccaacactttggaaggccaaggcaggtggatcacctgaggtcagcagtttgagaccagcctggccaatatggtgaaaccccgtctctactaaattacaaaaattagccaggcgtggtggcgggcgcctgtaatcccagctactcaggaggctgagggaggagaatcgcttgaacccaggaggcataggctgcagtgagcagagatcgcaccaatgcacaccagccggggcgacagagggagacaccatctcaaaaaaacacacaaaaaaacacaaaacaaacacacacacacacacacacacagaagtgttgcaaggctgtgtggctccacggctgttccatatctcaccctcatttcacagatgaggaaattgaggtgaagtgggggagaaggtttgttggggtcacacagccaggaggcagctgaggcaggaccctgggctctcagcatcctctctggggaagccctgattaagattctttctctgccaggaacctggaggagaagcggctcacttggaggcttccagatgtgtccgaggcaggcggtgagctgtggttgtgtatgagggctgggtgggagggactggggtcaggtgggaggcacttatttatgttggggaagaattggggacatactgagggcgggcaagtatgggcattgaggaagtctttaaaagctggaggagggccgggctgagtggcataggtctgtaatcccagtgctttgggaggcccagaatgcaggatcacttgagtccagcagttggaggctgcagtgacccgtgatcgtaccactgcactctagcctgggcaatagagccagactctgactcaaaaacaaacaaacaaacaaaaaaggccaggtgtggtggctcacgcctgtaatcccagcactttgggaggccgaggtgggtagatcacttgaggtcaggagttcaagaccaacctggccagcatggtgaaaccctgtctctactaaaaatataaaaattagccgcgtgtggtggcacgcacctgtgatcccagctacttgggaggctgaggcaggagaatcgcttgaacccagtaggtgaaggttgtagtgagccgagatcgtgccactgcactccagccagggtgacagagcgagactctgtctcaaaaaaaaaaaaaaaaaaaaaaaaaaaaaagctggaggagggccaaggacagtggcataggtctgtaatcccagtgctttgggaggcccaggtgggaggatcacttgagcccaggagttagaggctgcagtgacctatgattgcaccactatactccagcctgggcaacagagccagaccctgtctctaaaaaaaaaaaaaaaaagctgaaggagagggcgtcccagggccagatggccagacacagcaggtgcaaaggccctgaggcaggactcccttgctagccatacaaagcccagtgatgccaggagagacagatgcaggggatcaaagggaggtctgatggggcacataaaggccacagaacagagggcttcaggtgtgggccaaagatgagcctggttcacagctgggacgggggctggtgccagggcgcagctgactgcaggtctccccaggttctggccgcctctctgccagctgggagccgctctcagggcccagcacacccagccccgtggctgcacagttcaccagcgaggggaccactctgtcgggcgtggacttggaactggtgggcagcggttaccgcatgtcgctggtgaagaggaggtttgccacaggtactccccaaccctgctgctgggtgacctcaggagccgagatcttacaggggcaagccccggggtgtggggagggattggggtgtggggatccttgggaaagataggtgggtgttggggccaggagaccccagatggggggcacaggtgggcaaggaggcagggccctgtgtatctggggctggcccttggaggacgtccttggaaggaccccagccagggagcccgaagtcccccctgccaccccctcctccagccccaccctgttctcctgcccccaacaaggggctcctggggcccagtggcaacagggactatgagttacaggggtgttttgaagaggacaaggatgattgaagcatcccagggtcagagccggggaacccctcccgtacccctcctccccacccctccccctcacagctgcacccccacagggatgtacctggtgagctgctgaacccgcaaatgctgctgccccagctctacactgcgccctggtgctggctgaccaccccctgccctcctgccggaccctggggcctcccaccccagcctccctgaggcccatactccacggagaggagccccatgcccagcctggctgagcccgagattcgctcctccccctcatgccaaccccacacaggtcccggccttttaatgttctttgaataaacactttattttctaataaaataaaaaaggaaaccttttcctgctccaggaagtatcctttgcgttgccagagaggggaggaagagaaggtggatggatacgagagacctaatgtacctccctccctgcactgcgctcaaccggtacagggccattctgggagagaaagaacaacacagataccccagccccatgggctcagaggtgggctatagggagggaggaggactacagaagcccagaaaggggtgtcaggagtcttcccaagcagtcaggaagactttctaaggagggggcattataaatgaggttttgaggtatgagtaggagtttgcaagataggaatgggcatcccaagcaaagtgatggaaggttgttagttcaatgaggaagcaattagtcaacctacaaatattaattgagtatctactgtataccatgtagcagagagagagctatgagcaggacaaagttcttggaacccaggaagtggagataggaagcctgagtgaggagcctgcttggcggccactggctgtgtgactttaagcacgggacttgagcctcagctcatctgcaactcacctcactggatatctgtgggaggtcacacacttagaagagtgccaactacagggcaaaacccccactagtaccaggcagctttgggagccccaggaggagggtggaccttggtgcaggtgtgcaagaatggcccactggggagggcaggacagaagcagtaacagcagactgcagtggggagcaggtctgagcccagtggacagtcttgggtcctgatggatattcagggaaccagggcccgtgttcctgaccttgaggctgtacagaccccagggagcaagcccagactggatgaagctcagaaggaaggaagtaggaggcaggatttggcctgagacttgctgtgcgctgtctctgatcatcccaccctgtcctccaaagagagagtgcctctggctgtgcgtcagtttccttgtctgtaagatgggaggaatcctgtagttgggagaggttcagggagcattcttggcacaaagcaagtgcataattaacattggctgagagtcgggcaccgtggctcacgcctgtaatcccaacactttgggaggccgaggcaggaggatcacttgagagcaggagttcaagaccagcctgggcaacatagcaagaccccctgtttctacaaaaataggaaaattgacccagcatggtggcacacgcctatggtcccagctacttgggaggctgaggcaggaggatcaattgaacccaggaggttgaggctacagtgagctaagatcacactggtgctctccaaggctctgggcagccacagagtgagatactgtctcttaaataggccaggtagggtggctcatgcctataatcccagcactttgggaggccgaggcaggtggatcatttgaggtcaggagttcaagaccagcctggccaacatggtgaaaccccgtctccactaaaaatacaaaaattagccaggcggtagtagtgtgcacgtgtaatccctgctacttgggaggctgaggcaggagactcgcttgagcctgggaggcggaggttgtgatgagcccagattgtaccactgcactccagtctgggtgacagagtgagaccctgtatcaaaacaaaacaaaacaaaaacaacaaaaacgtcagctgtaggaaggaaggatgattataggagttggggcatcaaatgggggcagaggtggctgcagcacctgccctgtctggctacaaacagcccagggacttcccagcccttcatgtcttctcccttgcaggtcttagcacctaggctgtaaattcagagaccacacctgcccagtgggtgtggctctgggtgtcagagagtagtggcatccatggggccactgggtgtcagacatccatggggccctgggtatcagagctgagctttatagaggtgacaaaatcaaaatctgtttgccaccacctcctcataatgtagcctaatctgggcatgggttcttccctgtctgataagtggcgggtacatggcacctcctagtagcttttatttgccttcctggggacacaaatgaggctgggcaccttttaaaatgaagaaggcatctgggcatggtgactcatgcctgtaattccagcactctgggaggccaaggcaggtggatcacttgaggtcaggaattcgagaccagcctggccaacatgataaaaccccatctctactaaaaatacaaaaataagccaggcgtggtggtgggcgcctgtaatcccagctattcgggaggttgaggcaggagaatctctggagcccaggacgaggaggttgcagtgagctgagaacatgccactgcactccagcctgggagacagagactccatctcaaaaaagaaaccaaacaaacagggctgggcgcattggctcacgcctgtaatcccagcactttgggaggcccaggccggtggatcacttgaggccaggagttcgagactagcctggccaacatggtgaaacccccatctctactaagaaaacaaaaattagctgggcgtggtggcaggtgcctgtaatctcagctactcgggaggctgaggcaggagaattgcttgaacccggcaggcagaggtttcagtgagcccagatggcgccgctgcactccagccttgatgacagagcaagactccgtctcaaacaaacaacaacaacaacaacaaaaaaaacaaaaaaacacaagcaaacaaaaaagcgcagaaggcacttttcccaggtgtggcctcctaactgcccagccttccagagcaggtgtgacgtgacctatctcagaagagtgaattccaagagagagggcgcggaacccgttaaacctgccaaccccgggcaggcgtgatgccattatgcagtttacatgccctggtctcttccacccgggtggccttaaaacctcagctgtggtacagagtgatccattggcacagcaccatcaactgggccacatgtcagaggccacccccagctgataagtggcctaattggattttcttttgagctgaaattcacaaaacaaaaaatgaaccactttaaaatgaacaattcagtgagtttcagtatattcataatatgtgcaaccacaccctttatctaatttgtgcacattttcatcccctccgaaaggaaaccctgtccccttcagcagtcatgccccatttcccctcccacagctcctggcaaccactaattagcttcctgtctctgtggatttgcctgttctgggcatttcacataaatggaatcatacgacatgtggccttttgtgtctggcttctttcactcagcatcgtgttttttatttcatccctgttgtagcagggatcaggacttcaatctcttatcaggacttcaatctctctcttttttttttttttttgagacagagtctcgctctgtcatccaggctggagtgcagtggcatgatctgggctcactgcaacctctgcttcctggatttgagcagttctcctgcctcagctccccgagtagctgggattacaagcatgcgccaccatgcccaactaatttttgtatttttagtagagagggattttgccatgttggccaggctggtctcgaactcttgacctcaagtgatctgcctgcctcagcctcccaaagtgctgggattacaggcgtgagctactggccaggacttcagtctttctgatggctgaaaaagactccaggcagggcacagtggctcacacctgtaaccccagcactttgggaggctgaggcgggtggattgcttgaggtcaggggttcaagaccagcctgggcaacatggtgaaacccccgtctctactgaaaatacaaaaagtagccgggcgtggtggcaggtgcctataatcccagctactcgggaggctgagacaagagagctgcttgaacctgggaggtggaggttgcagtgagccaagatcctgccactgcactccagcctgggtgacagagcgagactctgtctcaaaaaaaaaaaaaaaaacaaaaaaaaaaaaaactcaagactccactgatggaccacatgttgtttatccattcatccactggacacttgggtgggtgatcaccacccaagcagctgaaaagaacactgtgaatcatgctgctatgaacttccctatgcaagcatttgtttcaacacctgttttcaactcctttgggtagatacctacaagggcaatggcgggatcatagggtcattctagtccggatttgaacccgggccctccagcaccagaattcactctattgcgtccagtgaaccccggaagcacccggtttaaaaggtctgggggctcagggtatctgtatgtcttacacatgggaaaagggtgggagggttcagtttccctgggtgagtggggcggggctagagctcacatcctcccagcagcctgaattctggagggccagtacctggtggaggaggggatgggcggggaccctgtcacaggatggtacttttttttttttttttttttgagatggagtctcactctgtcgcccaggctggagtgcagtggtgcgatcttggctcactgcaacctctgcctcccaggttcaagtgattctcctgcctcagcctcctgagtagctgggattacaggcgcccgccaccacacctggctaatatttttgttttttgtttttttttttttgagatggagtctcactctatctcccagactggagtgccgtggcatgatctctgctcactgcaacctccacctcctgggttcgagtgattctcctgcctcagcctcccgagtaggtgggattacaggcacccgccagtatgcctggctaatttttgtatgttttagtggagacggggtttcttcatgttggccaggctgatcgcaaagtcctgacctcaggtgatcccctcactttggcctttggaaggtgctgggattaccggcatgatctgcccacttcggccttccaaaatgctgagattatagggttgagccaccccgcccgcccaggatgggacttttggttccggctccttcccggccgacaaatcccttcctggggccatgacttggtgaacccagggacccaacagggtgagcatagactctgaatcaaagtccaaggatgtaccacagtaagaaagtgtgtgcatccagaaccgaggccagtagtgccacatttgacactatgacatttccggtaattgccctccatacagttttaatcatgcatttgctctgagggttcactccccagacctctcccatccagagtacccaggggctatttcttacattttacaggtgaggaaactgaggcacagacaggccacatatacacctcggcttcctcctcgggaagaaacagggatgaaggaggaaggaggggtttcctgaaaccatagcccagctcacacacctggacttccccaaccccagagctcccaacgctgggtccaggctagaatctcctagagattcagaggcagcacagggcagggttcgaatcctagccaacccaaccctaaaaatctacaaatctgaggccaggtgcagtggctcacatctataatccagcaccttggggatctgaggcaggaaggtcacttgaggcccacagttaagaccagcctgggcaacatatcaaaaccccatatctagaaaaatgacaaaaattagccaggcatgctggcgggtgcctgtagtcccagctactcgggaggctgaggtgggaggattgcttgaactggggaggtcgacattgtagcgagcggagatcacaccactgtactctagcctgggtgacaaagcgagatcctgtctctcaaaacaagaaaaaaagaaaaagaaaagactacaaatctgtctgattgttgacttccagaacccttccaaatgccagcaggtggcatctggatgtctgggggcacatcgtaggttttcgggtcctggaattattttcaatatagagatggaatctcactatgttgcccaggctggtctcaaactcctgggttccagcgatccgcccccctcggcctctggaagtacaggagtgagccactgcgccgaccccagcttcaggaatctttgaactccccgcagagagcagaggtgccgcaaggtttaacctgcctccctccctccttatcgccatgggcttatccaatcatttcttcacggaacacacgtgggccaacgctgaccgggctctgtgccaggaacccgcaaggcgctgcttgttcatctccagccacggggagctcattccctagcagcgggccagacccaaggtggggtcgtgagccccgagaggggcgagggtggcaagagcgggatggcagaggtggcagccgggaccggagaggggaagaggcatggccggggagggaggagccggcagagaacttcgcctgggccaccaggaaactcagccgagctgggaagagggggactggcaagcggccaaggcggagggaggcaggaaggcgtgaggcccggtgggagggaggaagcgggagaggggcgggagctctggctcaggtaaaaactctttcttcggctcgcgagctgagaggagcaggtagaggggcagaggcgggactgtcgtctgggggtgagtgtcggcagcccccggaggatctggcggaccccagtggtgggggtttgggggtggggaagttgtggctctggagaagcccctgccggtctccaccgcgcataccctgcagatgtgggaacattcgggagccccgagtctcgagaacccggttgccctcacccatccgtaattgtctccggcgttcccaaggccagctcggacctgggtcggggaggaagcctcccccacagctggcgacccgggaccccggcgcccctcccagattgggcgggatcagacccccgaggcggatgccgcttagtcagacttggctgttactgttacctgtgttgttgagattattggccccttggttgggagtatctgggcaagccagcgctggggtccccggttgggtttgggaactgcaggtgacccccagtctctccctgcggttccggtgctgcaggccctgccaggtggctgggcggcattccaggggccctggctgcgtggcatggacacattgctgaaccggcctcagtttcccctccgtgaggtggaacaatgaaccagctgggatgaggatgcccgaagcgtttagtcaaaggaaatttttgtgatgaggtgtactgctggccactgggggcccttgcgtgactggcgttaggtctctgagcctcagtttccctgtgtgttaagggggggtctcatggcatgggaccttggcgaggatgagttgagtggataggagctgtggccactcagtgggtgcccagggacagtcagctgtcatcataattatattaattatgtctgtagccactgttcagattcactcctgttccaagaatcccgaccatcttttcctctgggtcagatttaaactttttgtttgtttgttttatttgtagaggtgggggactcactttgtcacccaggctggagtacagtggctccatgcactgtattcactgcagcctcaacctcctgggctcaagtgatcctcccacctcagcctcccgagtagctgggactacaggtgcacaccacaggcagctaattttaaaatttttttgtgtgtggagacggggtctcactatgttgtccaggctggtctcaaactcctgggcccaagcaatcctcctgccttggcatctgaaagtgctgggatttcaggcatgagccactatgcccagctctgatttttttaaatggacacttctcaagaggaaactgaggtcgcccctcaacttgggcgggggactcctgcagtccagatctgggattcagggcccatgggaagccacctggccgtctaggtctggggccagccctgggggccatcacttcctcccactggcctgttctcaaggtgacaccaggcagggctggtgtcaggaggaagaggtgtggcccccaggtcaggcagctgggcccccatatggcctaggtgagcagttgggtgtttgctcagtccagcctggacaccctccctcactctcacccctagggtgtggcatttcctggcaggtgctctgggtgtgggagaaccaaaagggggccttggtgcttctctgttccaggccagagttcaggaatccagacaagccaggtcagcccaggaggagcaagtaagggctcactgagtgacatttcctcctgccaccagcctctgaggcccagagcaagcaggaatttgctcactcccccaaccccatgagccagggaggatgcctattgtggaccctcttcctggtgggaatctggcttgccttgattgctcctcatgatggtgaggtcactaccaacgtggcaaactaaaggaaatctcatcagctgggagttaaagacaggaactaggctcccacccaacctttcttaggtggatttctaggcctctctgtgcctcaattttcctatccataaaaatggagctaatgcagccctacttctcagcacacatatagagtttagatggacagatggtggccaggctgcacacaggacctggcatattgatcctagtcctaattatgcagctcattatgttatcatttatagcatgtatctttgcacacagaaataatatcatgaatatttctgagctctaagtacaagacttggagaagagctctgaccagcctgaaggtgtgggggtccaggaagtccccagaggaggggcccaggagacctcagttcccccatcactcctggattgtgggaagggtctgaggttgaactgcgatgcacggcctggcttcccagcctgtttccccatctatggagtgagcccaaagatgccctttgagactccactgggccagggctggtgttattcaggggcccctttccagtctcacataggtgccccaggcagttcctgcaatggggtagggctggcatggatgacatacaattagtcatccatgacagagcctcgggacctagaaacccgggacaccaaagtctaaagtgcatgtgtcaccgtgcccaaccccacccctttttccatacccaggcactccctggtgcagatattgagtatatattgacagagaactcactagtacacatggtttcactaaagcagggtccggccattgtgaacttaaaggatttactgggctatttcttcttcttttcttccccttctgtttgcaaaagcaactcctgctccttgtaaaaagggaccagcctatcattactgggaaacccaaactggtaagaactggtgaggaaccacccacaggggctggcagatcagggttcaaatcccaccaacccgccctggcctcagtcggctgtgtgaccttgggcagagttgcaccctctctgcacagatcgtccacctggaccctaggctcccctctggaaggctcagtgagactcctcgggttcctccacaggccaggggctcacaccctctcctgcaagcgtccccaacttccaccctggagtttcttcacccctagaggttgcactcctctggaaaattgtcctgtttgccacttctctgtcccctgttagtggtgtatcagcgtcctgggcacacgagtgtttctctccatcatcttggctgtgtcctcggaacctagacccagatgtggcatacgctaggtgctcagcacttgctcagagcagtcacaactctgcaggtgataagggtggtggcagctgctattaaatctcattgtggctgggcgtggtggctaacacctgtatttccagcactttgggagaccgaggcgggtggatcacctgaggtcaggagtttgagaccagcctaggtgacgtggtgaaaccccatctctactaaaaatacaaaaattagctgggcatggtaacgcacacctgtaatcccagcttctctggaggctgagacaggagaatcgcttgaaccctggaggcagaggttgcagtgagccaagatagcaccactgcactccagcctgggcaacagagtgcggctctgtctcaaaaaaaaaaaaatctaattgtggctgggtgcagtggctcacaactgtaatccctgcactttgggaggctgaggtgggaggatcacttgagcccaggagttggagaccagcctgggcaacatagcgagacccatctctacaaaaatgaaattagccaggggtggtgatgcatgcctgtggtcccagctactcaggaggctgaggcaagaggatcagttgagccctggagttggaggctgcagtgagctatgatcgtgccactgcaccactccagcctgggtgacagagcaagatcctgtctcaagaaaagaaaaaaaaaatctcattgttggcgcttcacatatgtgccacttggagaaaaggccactgcttggagctaccacttgaccctctagcctttcccaggactcaaatccgtatgtagtcaaacgggattcttccagaagcttctctcaccctccacctcttgccttgccttttggcggcctcagaatgttccacacctccatccaaatcccaatttaggatgggtgagaattggagaaacagcggccacagcaatgctgatagtcaggtggtggttctgccaccattccagctttttttttttttttttttttgagatggagtctcatttacccgggctggagtgcagtggcgcaatctcggctccctgtaacctccacctcctgggttcaagcgattctcctgcctcaggctcctgagtagctgggattacaggcgccctccactatacctagctaattttttgtatttttagtagaaatggggtttcaccatgttggccaggctggtctcgaactcctgacctcatgattcgcccgcctctgcctcccaaagtgctgggattacaggtgtgagccaccgagcccggctgaccatcccagctttgcagaggaggatgctaaggtctgggtggccccagctactcggcccaggtcccatggaaggtcagtagctgggtcagaaggcccttcctcaacggctgtcgggggtccccatggctgcttcaaaggcatcagctcacagaccagtcctcccagctgcaggcaaggcagagactgagagccagcgaccaggctggttaggggtatccaggccggttaggggtatccaggcctgggagtccctgaagagcaatccagaagtagccctatctgggcctcagtttcctcatctggaaagtgggagtttcacagggagaattaccttaatgctatggagacctctgagtcagtgtcaggacatcccccgccccctgtgccactccccatcacctgtggtctccaaatagtcttgggagtgaggggggcagatctagccccaggtggtaccagcagggtccttgatgactttcacatgccccacatctcttgcagacagtgacaagaacagggttgagactgggcgcagtggctcactcctgtaatcccagcactttgggaggccgaggcgggcagatcacttgaggtcaggagttcgagaccagcctggccaacgcgctgaaaccccgtctttactaaatatacaaaaattagctgggtgtggtggcgcacacttgtaatctcagctacttgggaggctgaggcaggaggatcgcttgaaaccaggaggcggaagttgcagtgagccaagatcacaccactgcacttcagcctgggggacacagcaagcgagactctgtctccagaataaaaccaaagaaacagggatgagggcgacagaggtgcctggagccacttgcacctggggcaagggcccagccttgactgccccctgggagtggcagaggacatggggccagggtgcagctgccaatgcctacgattctgctgagcagacaacccttctgcatatttagtggtcattaattttcaatgagtcattaatacttagtatcacctgtgcattgaagcatgaatattcagtgaccatgaatatttggtatctgaagactgtttgtggcttgttaatattcctcatgatactattaggccgggcgaggtggctcatgcctgtaatcccagcactttgggaggctgaggtgggtggatcacctgagattaggagtttgaaaccagcctggccaacatggtgaaactctgtctctactaaaaatacaaaaattagccgggtgtggtggtacatgcctgtaatccctgctactcaggaggctgaggcaggagaatcacttgaacccaggagggtgcaacctccaggttgcagtgagctgagatcgtggcgctgcacttcagcctgggcgacagaggctctatctaaaatatatatatgtatatatatatattcctcatgataatattcaagtatcatgtatgtgacttgcaactttaaaaaaaattcagtatatttgggcacaacttgcaacttttcattattgctttgcaactattttgtatattacgaatagtaggcacctcctctgtagttaatggattgttaatgttcagtacttcactaacatgcagcactttttttgtttgtttgtttgttttgtttttgagacagggtcttgctctgttccccaggctggagtactgtggcgagatcatggctcactgcagccttgacctcctgggctcaagcgatcctcccacctcagcctcccaagtagccaggactacaggcgcacaccaccatgcccggctaatttttgtattttttgtagagatggggttttgccatcttgcccaaactcttgggctcaagtgatccttccttctcagcctctcaaacagctgggattacaggtacaagccaccatacccagctgttttttgtttttttgttttgagacaggatcttgctctgttgcccaggctggagtgcagtggtgctatcatagctcactgcagccttgaactcctgggctcaagcgattctcctgcctcagcttcccaagtagctgggactacaggtgcacgccaccacacctggctaatttttacactttttgtagagacagagtctcaccatgttgcccaggctggtcttgaactcttgggctcaagtgatcctcccacctcagcctcctgagtagctgggactataggcactcaccaccaccacaccaggctaattaaaaaaattttttttggctgggcatggtggctcacgcctgtaatcccaacactttgggaggctgaggtgggcggatcacttgaggtcaggagtttgagactagcctgcccaacatggtgaaaccccgtctctactaaaaataccaaaagtagccaggcgtggtggcacatgcctgtagtcccagctattcaggaggctgaggcaggataatcgcttgaacctgggaagcgggggttgcagtgagctgagatcatgccattgcactccagcctgggtgacctagcaagattctgtctccaaaaaaaaaaaaaaatcattgtagagacagggtcttgctgtgttacccaggctggtcttgagcacctaagctcaagtgatcctcctgcctcagcctcctaaagcactgggattacaggtgacttatcttgactgaatcacgggtgcccaaggcttactagtctcccaagctataaatctgtcttctgaggcagaacgtgtgcggcaggggactgtggctgctgcctcgtggagtgggggcgaggctgcagtgagataggaggtgatggctatcgtactttttcccttctgcaacaaactaggtagcatcctgtgggagcacagttgcaggagataagatgcccagccctggggcttcaggctggctgggcagatggacaggagagaagcgaagagatttcccatgtctgatggtggtgaatgctacagacatcagcagtgctggggctaggtgttttagcctggaggtcgaagcctctcggaggtgacatttcaggggaagcctaaatatgaagactacggaaagagctggaaaggaagggggtcctaggtggaggcagtggcaggtgcaaaggccctgaggcagggctgagcttgggtggtttttgtttgttttgagacagggtctcgctttgccaccaggctggaagtgtgatcacagctccctgcagcctccacttccagggctcaagtgatcctcccacctcagcctcccgagtagctgggactaaaggcatacaccaccatactcagctaatttttttacttttttttttaatttttagcacagacaggtctcccttttttgcccaggctggtcttgaactcctaggctcaagcaaccctcttgcttcagcctcctaaagtgcaaggattataggcatgagctactgcatccagcctgagcctgggtgttaaaggattttttttttttttgagacagaatctggctatattgcccaggctggcgtgcagtggcacgatctcggctcactgcaacctccacctcctggattcaagtgattctcctgcctcagcctcctgagtagctgggattacaggcgtgtgccaccacacctggctaatttttgtatttttagtagagacagagtttcaccatgttggccaggctggtctcaaactcctgacctcaggtgatctgccctccttgacctcccaaagtaccgggattacagacgtgggccacagctcccggccatgtttaaggaggctggtgcagctggagcagatgagtgagggcagagattgtgtgggaaagatggcagcagagaggacccacatcctgcagccacaccccaggcggtggcttctgggtcttggcaggggaaataaatggcttttctgtgcatttgaggaagtgggttctggaggatggcaaaatcgcactggcacgtgaagtgcaaacagctccaggcaggaccgactggtctggcagcgggcggccaggcgagggtccccaagagtcagcctggatgtcactgctggacactggtggcaccgtgtctggcttggggtgaagttttttcacccaccttgaacaggagtgcagggtaggcgctgtaacatgcagggaacatatgacaattgcctgttggcaccaggcatggtgactggtgcctgtggtcgcagctactcaagaggctaaggcaggaggatcacttgagcccaggagctggaggctgcagtgagctatgatcgccactgcactccagcctggacaacagagcaagtgagatcctatcactaaaaaaaaaaaaaaaaaatttttaattagctggcaaggtggcttatgtctgtaatcccagcgctttgggaagccaaggcaagaggattgcttgaggccaggaattcaagaccagcctggacaacatagtgagaccctgtctcttaaaacacagcacacacaatcaatacctgttgggccttcctggcttataggccatggtgtgccaacagctctcacctggataccagactgagcctcccactgcccagaggttcctcattctgctccttctggtccttctttttccaccccctaacatctggacatctgggctgtgatcgaaacattgatgactttcttcatcttattttccttttttttttcttttctttctttcttttttttctttttttttttttttttgagacagagtcttgttctatcgcccaggctggagtacaatggcttgatcttggctcactgccacctccgcctcccagattcaagtgattctactgtctcagcctcctgagtagctgggattacagacacgcaccaccacacccgggtaatttttgtatttttagtagagatggggttttgccatgttggccaggctgatctcgaactcctgagctcaagtgattgcctcggcttcccaaagtgctgagattacaggcgtgagccaccgtgcccagcttttttttttttttttttttttgagacatagtcttgctctgttgcccaggctggagtgcagtggtgtgatcttggctcactgcaacctccgcctcctgggttcaagcgattttccttcctcagcctcctgagtagctgggattacaggcatgagccatgagccaccacgccctgctaatttttgtatctaatattttgtatttagtagagacgggggtttcaccatgttggccaggctggtctcgaactcctgacctcaggtgatccaccactttggcctcccaaagtgctgggatgacagctgtgagccactgcacccagcccttcaccttattttctaaacctgcatactctcctataccccagcagccagcctctgtctaggccaccaaactcttccacctagatgttacccaatctccccccacccagcctcctgagtagctgggactacaggtgtacaccaccacactcagctaattttgtttcatttttttatttagcagagacagggtctcccttagttgccctgccctgactgaaatgtccctaatcccttagtgaccacagggatttttttttttttttttaatgacagtctctctctgttgcccaggctggagtggtgtgattatagctcactgcagcctcaaactcctggggtcaggcaatcctcccacctcaacctcccgcatagctaggactacaagtatgcatcatcacgccggctaacttttgtattttgggtagagatggggtttcaccatgttgcccaggctggtctcaaactcctaagctcaagcgatcctcctacctcagcctcccagagtgctgggattataggcctgagccaccttgcccagcccacaggggacttcttaaaggcataaatcaatctgatccctcccctgctcatagaccctccatggctcctcattgcttctcacaggaaacataagacattctttctggcgtgcccattctattcttgtaccctagcagggtcccataactccaccatcacctcctttctctcgccctgtcccaaccacgtcagcctcctcgctctgccaccagcaccctaaatttgtatccatctcagggcctttgcacatgctccactctgtctggaatgcccttccccacagtctgctcaagtgaattcccatcatccttcaggacctccctgatcctaggttgctcaggtcccctgtggacctgcctcagtaacaattagtatggctgtcactaattgttagtatcatttacaatttttttttttgagacagcatcttgctctgttgcccaggctggagtgcagtggtgtgatcatagctcactgcagccttgaactcctgggctcaggtggtcctcccacctcagcctcccaagtaactgagacctcaagcacatgctaccacagcctgctaattttttgttttgttttgttttgagacagagtctttctctgtcatccaggctggagtgcaatggtgtgatcatagctcactgcagcctccacctcctgggttcaagtgattttcctgcctcagcctcccgagtagttgggactacaggcacccatcaccatgcctggctaatttttgtattttcttttttttttttttgtagagagtgggtttccccatgttggccaggctgctgttgaactcctgacctcaagtaatccacctgccttggcttcctaaagtgttgggattatgggtgtgagccactgcgcccagcctaatttttgtgttttttgtagagacggggtttcaccatgctgcccaagctgttctacttattgttatattgagggcagggctggcttggtcacagctgtatccccagcatctagcatacagtaggtgctcagttaacactctagggctgatgagcactgtgacagttaacaggattggactcatgcacgttcacggatattcacctgtctgtgccccaggtggccgagagttggccaggttctctttgagggatgtttggtgccatccatgacgcagtcccttgtgacagattctgggaggccctgaggtgttggaagggagtctcccagtgaccccgagttgagggacgtatgagatgggcatactgcacccatcaaagttctgggttccggctggggacggtggctcatgcctgtaatcccagcactttggaaggctaaggtgggcagatcatgaggtcaggagatcgagaccatcctggccaacacggtgaaaccttgtctctcctaaaaatacaaaaattaactgggcgtggtggcgcgtgcctgtagtcccagctactctgaaagatgaggcaggaggatcgctcgtatgcaggaggcggaggttgaagtgagccgagattgtgccactgtattccagcctgggcaactccatctcaagaaaaaaaaaaaaaaaaaaaagtcctgggttctgatactgctccatgctgtaagtgggaatagctggggaatcaaggtagccaggatggtggactcatggtcactgaggcggtcaccacacagctaatatgcatcaagcccttttgcagtcagggagcagtggccccagtgtgtgtgtgtgtgtgtgtgtgtgtgtgtgtgtattggagcaggaacctcagcacccccatgtcctaataaggaaactaagacttcacacagaaaggcagggcacagtgactcatgcctgtcatcccagccctttgggaggccgaggcaggtggatcacttgaggtcaggagttcaagaccagcctggccaacatggtaaaaccccgtctctactaaaaatacaaaaaaattagccaggcatggtggctcacacctgtaatcccagctactcaggaggctgaggcaggaggatcgcttgaacccatgaggtggaggctgcagtaagcggaaattacaccactgcactccagcctgggcaacagaacaagagagagagagagagagagacgctgtctcaaaaaaaaaaaacaaaattaaaaaatttaaaaaattaatccccagcagggagggccagggcacctgtcagagccaacaggggttggagtgctttgaaatgggtcttgcaaggggtggaggagttaagtggggggtgaatttcaatattttgccaacctgagcaactgtacaggtgcaaccagatgttgggggccacaggaaaagcgctttgctcatggcgagtgttcagtgagttttgttttccacaggagccgcccaggaggctcctcaggccgaccccagaccctggctggccaggatgaagtatctccggcaccggcggcccaatgccaccctcattctggccatcggcgctttcaccctcctcctcttcagtctgctagtgtcaccacccacctgcaaggtccaggagcagccaccggcgatccccgaggccctggcctggcccactccacccacccgcccagccccggccccgtgccatgccaacacctctatggtcacccacccggacttcgccacgcagccgcagcacgttcagaacttcctcctgtacagacactgccgccactttcccctgctgcaggacgtgcccccctctaagtgcgcgcagccggtcttcctgctgctggtgatcaagtcctcccctagcaactatgtgcgccgcgagctgctgcggcgcacgtggggccgcgagcgcaaggtacggggtttgcagctgcgcctcctcttcctggtgggcacagcctccaacccgcacgaggcccgcaaggtcaaccggctgctggagctggaggcacagactcacggagacatcctgcagtgggacttccacgactccttcttcaacctcacgctcaagcaggtgcgctggactggggtcacctgatcggggccacctgtccttcttgtccaaattaccacccactcctgagggacccaggggaccagaagtcctcgtcagtccatcacagcccattctgcccctctgctgtcctcaccagcctcgtggagacccaaaatggtcttcttctaggagaggctagggggaagggcagaggagctaggttactagcacagagctcaagcctgatgatgcggattcgaatccaagctctgcctcttacttggtgttcgaccttggaggagttcattcacctctctgtgcctcacttttctcacctggaaaatgggatgtgaatgagtcccacccacctctaagggctactgtgaggtttacaggagatggagtttataaggcacccagaccagtgctggatgtccaactcaacttggcaatgacgggggacacatctccttgtttatttttatgtttatttatttttttttaatggagtcttgctctgttgcccagcctggagtgcagtggtgcgatctgggcttgctgcaaccacctcctggtttccggcgatcctactgcctcagcctcccaagtagctgggattacaggcactcaccatgcccagctaatttttgtattttgagtagagacggggtttcaccctgttggccagggtaatctcgaactcctgacctcaggtgatcttcccgcctcggcctcccaaagtgctgggattacaggcgtgagccactgcgcccggccaacatctccttgtttatttgttccggttctgtctccccatgaggctgggggccttgtctgtttcactcactgctgtgtccctaatgcctagaatagattcaggtgcacagcatgtgctcagtcaagacctttttgatggacaagaacccatgagaggtagctaggcttggtggctcatgcctgtaatcccagcactttgggaagctgaggagggaggatcgcttgagcccaagagtttgaggccagcctgagccacatagcgagacctcatctttttcaaaaaaaatttaattaattaatttttatgtttttttaattaattttttttttttggatggagtctggctctgtcccccaggctggagtgcagtggtgcaatctcggctcactgcaacctccacctcccaggttcaagtgattctcctgcctcagcctcctgagtagctgggaatacaggtgcatgccactatgcccagctaatttttttgtacttttagcagagatggggtttcaccatgttggccaggctggtctcaaactcctgacctcaagtgatcctcctgccttggcctcccaaagtgctgggattacaggtatgagccaccacgcacagcctcgtctctatttttttaaaaaaagaagccatgagaggtgagaaaatcctgcccatctgcagatgaggaaatggaggggctctaagaacccctcctaggtcctcgagtagagcaagacaagtagagacaacattttcaaggaggaacagggaactctgcaggttcctgctcataggaggtacagacaggcctgggttcaagtcctctggtagctgtttctctgcgggtgacctcactgcagttttctctggagagcctctgttccctcatctgtaaataagatagaggaccacttctgcctcctaagggtgcattcaggattcaaggtagggtaagcaccaagcacagcgcccggcaacaaacagatacccagcctgtgtaggttactgtaggggaaactgaggctgaggcgggtaggggccatggcctcttaacatgctgtgttctgaaaacacaaaagtggctaggcacagtggctcatgcctataatcccagcactttgggaggctgaggtgggcggatcacttgagaccaggagttcgagaccagcttcttgggaggctaaggcagcaggatcgcttgaaccctggaggcggaggttggagtgagttaagattgtgccactgcactccagcctgggtgacagagtgagactctgtctcaaaaacaaaaacaaaaaaccctttaaaagtgtgtgataaacatcagcttgacaaatatgaacccagcacccgtgaagcactggcactatgctgggtgctgagggagatggcatgaacagaaaagagagacacaggcccaaggagggaagtccagtgtttggtgggagagggggatgttaacaatcacacaggtcaggcacggtggctcacacctgtaatcccagcactttgggaggctgaggcaggtggatcacctgaggtcaggagttcaagaccagcctgaccaacatggtgaaaccctgtctctactaaatacaaaaaattagccaggtgtggtggtgcatgcctgtaatcccagctacttgggaggctgaggcagaagaattgcttgaacctgaaaggcggaggttgcagtgagccgagattgcaccactccactccagcctgggcaacaaaagcgaaaactccatctccaaaaaaataataataataataataaaataaaaatcacacaaaggccaggagtggtggctcattgcttgtaatgtcagcattttgggaggctgaggtgggaggatcctttgaggtctggagtctgagaccagcctgcgtagcatagcaagatcccatctcttaaaaaaaaaaaaattattagccaggagtaagtagcggcatgtgtctgtagtaccagctacttgggaggctgaggtggaaggatcacctgagcccgggaatttgaggctgcaatgaactatgatcatagcgctacactctagcctgggcaatagagcaagaccctgtctcagaaacaaacaaaattcatacaaatgattatttaacaacagggcttggccaggcagagttggaaggaatagcaatacatgtaaatgtaacaattttccagcatttcttggtgcttcatggagcatggtctccatggattccccaacactcctagaggcacatgataaggcctgtttggagagttgaaaccaaggcacagagagggtttcccaagtaaccccacagggcagggccttaacccaggctggattgtggacacttcctttcctgggcttagtgggctggagtggctaatagagacccaaggccaatttctccagccctcaagcaagcatgccctgtccaccctgcctgcaggtcctgttcttacagtggcaggagacaaggtgcgccaacgccagcttcgtgctcaacggggatgatgacgtctttgcacacacagacaacatggtcttctacctgcaggaccatgaccctggccgccacctcttcgtggggcaactgatccaaaacgtgggccccatccgggctttttggagcaagtactatgtgccagaggtggtgactcagaatgagcggtacccaccctattgtgggggtggtggcttcttgctgtcccgcttcacggccgctgccctgcgccgtgctgcccatgtcttggacatcttccccattgatgatgtcttcctgggtatgtgtctggagcttgagggactgaagcctgcctcccacagcggcatccgcacgtctggcgtgcgggctccatcgcaacgcctgtcctcctttgacccctgcttctaccgagacctgctgctggtgcaccgcttcctaccttatgagatgctgctcatgtgggatgcgctgaaccagcccaacctcacctgcggcaatcagacacagatctactgagtcagcatcagggtccccagcctctgggctcctgtttccataggaaggggcgacaccttcctcccaggaagctgagacctttgtggtctgagcataagggagtgccagggaaggtttgaggtttgatgagtgaatattctggctggcgaactcctacacatccttcaaaacccacctggtactgttccagcatcttccctggatggctggaggaactccagaaaatatccatcttctttttgtggctgctaatggcagaagtgcctgtgctagagttccaactgtggatgcatccgtcccgtttgagtcaaagtcttacttccctgctctcacctactcacagacgggatgctaagcagtgcacctgcagtggtttaatggcagataagctccgtctgcagttccaggccagccagaaactcctgtgtccacatagagctgacgtgagaaatatctttcagcccaggagagaggggtcctgatcttaaccctttcctgggtctcagacaactcagaaggttggggggataccagagaggtggtggaataggaccgccccctccttacttgtgggatcaaatgctgtaatggtggaggtgtgggcagaggagggaggcaagtgtcctttgaaagttgtgagagctcagagtttctggggtcctcattaggagcccccatccctgtgttccccaagaattcagagaacagcactggggctggaatgatctttaatgggcccaaggccaacaggcatatgcctcactactgcctggagaagggagagattcaggtcctccagcagcctccctcacccagtatgttttacagattacggggggaccgggtgagccagtgaccccctgtagcccccagcttcaggcctcagtgtctgccagtcaagcttcacaggcattgtgatggggcagccttggggaatataaaattttgtgaagacttggagatctttttttttttttaagcaaatttacaagtttcaacagacaagtccacattcatccctaaaagtctcattttccagtagaaaatatacactggtaaaaacggggcatggggccgtggctcagggctgtaattctagcacattgggagaccaaagtgggaggatcacttgagcccaggagttctggatcctgtctctgcacaaaataaaaaattactcaggcgtggtggtgctcacatgcctgtagtcccagctatacttgggaggctgaggcgagaggatcgcttgagcccaggagttggaggctgcagtgaaccatgattgcgccactgtactccactgggcggcaataagaagacaaaaacataaaacaggacatgtgtgaggcaaaagctgcaggaatttctatcaggcagatctgacctcatcccacccaccccctgctcagatacccttcatagctccttattgctttcagctcataaccccacatatccccacagacagattctttttttttttttttaagacggattctcattctgttgcccaggctggagtgtagtggcgtgatctcggctcattgcaacttccgcctcccagattcaaacaattctcctgcctcagcctcccaagtagctgggattacaggttacaggcatgtgccaccatgtccagctaatttttgtatttttgatagagacggcatttcaccatgttgcccaggatggtctcaaactcctgacctcaagtgatccacccgccggcctcccaaagatgctgggattacaggcgtgagccacagtgcctggccagccaaagatagattcttgcttccaggttgtcagcagacttaggagcgggaggtacagggtgagatgctcttagctggattggatgctgggcccaccttggcctcctgcttccagcaaggccccctctgaataccatcccagccaccagcagcctccctctccttaccaggcttgccttccctggttggaacctcagatctactgctctctgtagctcatcctttcctcccctcctcaagtgcttattatgcacctgccatgtgctacacgccttgccctgtactcctcctccctcctgtgggaagggtcagctgatacagacccaccttatggtgaggaaacaaacctgaaaatgatcaaatgggaagttcccgggagcaataagagctttgagcagaatttttttttaaattttattttattttatttatttttgagacagagtctcgctctgttgcccaggctggagtgtggtggcacaatctcatctcactgcaacctctgcctcctgagttcaagtgattctcatgcctcagcctcccaagttgctgggattacaggcatgcgccaccacgcctggctaatttttgtatttgtagtacagacagggtttcaccatgttgtccaggctgatctcgaactcctggcctcaagggatccacctgcctcagcctcccaaagtgttgggattagaggcataagccactgcaccagcctgagcagaatttaaatgggataacagggccaaacacagtgactcatgcctataattccagggctttgggaggcagaggtgggaggatcacctgagcccaggagttcgagaccagcctgggcaacatagcgagaccctgtctctacagaaaaaaaaaattagcccagtgtggtagtgcccacttatggtcccagctactcggaaagctgaggtgggaggatcacttgagcctgggaggttgaggttgcagtgagccaggaccatgccactgcactccagcctgggtgagagggagaccttgtttcaaaaataaaatgaggctgggcatggtggctcacgattgtaatcccagcagtttgggaggccgaggtgggcggatcacctgaagtcaggagaccaagaccagcctagacaaggcgaaaccccgtctccactaaaaatacaaaaattagcagagtgtggtggcatatgcctgtaatcccagctacctgagaggctgaggcaggagaatcacttgaacctgggagacggaggttgcagtgagctgagactgagccactgcactccagcctgggcgacagagtgagaatctatctcaaaaaaaagaaaaaaaaaaataggccagccgtggtggctcacacctgtaatcccagcactttgggaggccgaggtgggtggatcacaaggtcagaagattgagaccattctggccaacatggtgacaccccgtctctactaaaaatatgaaaattagccaggcgtggtggtgtgcacttgtagtcccagctactcaggaggctgagggcaaaagaatcgcttgaacccgggaggcggaggttgcagtgagccgagccgagatcatgccactgcactccagcctgggtgacagagtgagactcagtctccaaaaaaaaaaaaaaaaaaaggtggttaaaaatggctgctctggggactggagggagttgggaggatgagacaccatcctgcaaatcaggcctggatgagatggggctgcagggctttctgacaggcacatctgacctcattctgcccctgctcacacagcctctgtggctccctattgccatcaggggagagtcccagctcccctgctccactggattgagtagtgtctggcaagaattcatgtctgagaattcatattcatattctgagaattcatattctgagaattcacctcagaatatgggcttatttggaaatagggtctttatagacagacatgaggttatcatggattagggtggaccctaaatccgatgactgggccaggcacgtggctcatgcctgtaatctcaacactttgggaggccgaggtgggcggatcacctgagttcaggagttcaagaccagcctggccaacatggtgaaaccccgtctctactaaaaatgcaaaaattagctgggtgtggtggcgggtgcctgtaatcccagctacttaggaggctgaagtgggaggatcacttcagcccaggagttggaggctgcagtaagctatgattgtgccactgcactccagcctgggtgacagagtgagaccctgcctcaaaaaaaaaaaaaaaaaaaaagactaatgtgttttgtgatgatcattttctgacatttgttttgtgtctaatgtctaccattctaagtcctcaatgctaaggactcccatgggccttggtagagacctcggttcaagtcctgcacttacccttccctgtctgaccttggcaagcagccctctccctgggcctcagtttccccactttgcgttgcaatgcctctctagttatcaagctcctggaagtgccggtgggtccatggctgctgggggacaagcccacacagggactgactgaggcttgtccctttttctagagaaaatgcaggaagctgctttgggtcgtttatttactaagagacagcaagaaggggtgttacacatgcagggagcggagcgtctggggctcccctggagtgaggacatttggctgtcagtgtccagcatctgtgaaagcggggatcctccaagccagggctagggtgtgatttattctgcagttgactccacaggctgcaggtggcattggtctggggtagatagtgagcacccatcccaggaggtaatcaaaggcctgtagatgcgagactttatggtgctgtgtggcctcaggagctcaccagaccagaccctctgggcctcaggccactctgaggctgcacccaaggaggaatcagtagggacagagggtcagcaggtcttgttgggtacagccactgaggcagcagtagcgtgcagggttggtggcagctgcacggtggtggcggtgatggtgagaggtctggggcaggggctgcaggccaggtcccagcgtgagattactgtcggccaccagcccatggagcagatgtcgtctctccagccactgtagcaactcacctggggacagagtgaaactcagctggaacggaaacgacagaggacatgctaccccatgctgcatgtgcacgaatccacacacatcccactgagtaacccaccaaacactcatgcatgcagataaaaagtgagcactggccgggtgcagtggcttacacctgtaatcccagcactttgggaggccgaggtgggcggatcacgaggtcaggagtttgagaccatcctggctaacacagtgaaaccccttctctactaaaaaaaaaaacaaccaaaaaattagccgggtgtggtggcgggcgcctgtagtcccagctactcaggaggctgaggcaggagaatgacgtgaacccaggaggcagagcttgcagtgagccgagatcacgccactgcactccagcctgggtgacagagtgagactctgtctcaaaaaaaaaaaaaaaaaagtgagcactggcccggctcagtggctcacgcctgtaatcccagcactttgggaggccgaggtgggtggatcacttgaggtcaggagtttgagatcagcctggccaacatggtaaaaacctgtctctactaaaaaatacaaaaattagtcaggcgtggtggtggacgcctgtaatcccagctactggggaggctggggtgggagaatcacttgaacccaggaggtggaggttgcagggagctgggatcatgccattgcactccagcctaggtgacaagaatgaaactccatctcaaaaaaaaaaaaaaaaaaaaaaagcgagcacttattaagcacctactgtacgccaggcacctggttaatcctctcatccactcaactcatgtccacactcacatccccagctgcgtgggtccccatatgccacctgagtgccccatgccctgcccagggagtgtcgggggtcttggagctacagatggtgtcagtttccccaacaggtccaagggtccgtgagacacccagagcaggtcagagacccacccacagactcctcgtggtacagagacatgcaggggtgtacatgtgtctgtgggtccacttcctggtcacccacgcatgtgtggtggacccacagacacacacacacccctacgaggacacacccttgcagaccacctcccctggatccctaacaccgcaagtggagtggcacacagagacatgtggacacgtgttaacacatctgcacaaacttgtcgtatatccctgcaccagggccaggactagggtacagacagggaggcacgaagccatcaggatatttttttgaggccaggcaccgtggctcacacctgtcatcccagcattttgggaagcctaggtgggtgcgttgcttgagcccaggagttcatgaccagccttggcaatacagcaaaacctcatctctgcagaaaatacaaaaattagctgggcataattctgcatgcctgtagtcccagctacttgggaggctgaggtgggaggatcgcttgagcctgggaaggcaaggctgcagtgacccgagatcgtgccactgcactccagcctgagtgacagagcaagactgtctcaaaagaaaaaaaaaaggacttatgaaaatttagagggttgtttaccctctacccaatctgcagtttacaattgacaccagtggttctcaaaccagggtgattttgtttccaggggatacttgtctggggacagttttagatgtcacaacttggatggggtgtgaggctattcatggcattagggggcagaagacagagatgttatctaacaccctacaatatacaggacagccccactaccatatacatccccaaatgtcagcatcagctttttttttttgagatggagtctcgctctgttgccaagctggagtgcagtggcgtgatcttggctcactgcaacctccacctcccgggttcaagtgattctcctgcctcagcctcctgagtagctgagactacaggtgtgcgccacaacgcccggctaatttttgtatttttagtagagacgaggtttcgccacgttggccaggctggtctcaccagcctgagagtagctagtcacagctactcaggaggctgaggtgggcagattgcttgagtctgggaggcagaggttgcaatgagccgagatcacgccactgcactccagcctgggtgatagagtgagaccctgtctcaaaatatatatatataataataataatattaatatttttcccttttttgagacaagggtctctgtctcaggctgagtctcatattgcccaggttggtctcaaactcctggcctcaagtgatcttccctcctagcctcctgagtagcagggattacaggcatgagccaccacatccagcaaggtaagtattttaatgcaatacttttaaaataaaatttaaaatatttgtaaaaaggccaggcacagcggctcacgcttgtaatcccaacactttgggaggctgaggcgggcagatcacctgaggtcaggagttcaagaccagcctggcccgggcacagtggctcatgcctgtaatcccagccctttgggaggccgaggcaggtggatcacgagatcaggagattgagaccatccttgctaacatggtgaaaccccatctctactaaaaatacaaaaaatttagctgggcttggtggcaggcgcctgcagtcccagctactcaggaggctgaggcaggagaatggcgtgaagccgggagacggagcttgcagtgagccgagatcacaccactgcactccagcctgggggacagagcgagactcaatgtcaaaacaaaacaaaacaaaacaaaacaagaccagactggccaacatggtgaaacctgttgtttcacctgttcacctgtctctactaaaaatacaaaaaaaaaaaaaaatcagctgtgcatggtagtgggtgacctggggagtggcctgtaatcccagctacttggaaggctgaggcaggagaattgcttgaactcaggaggcggaggttgcagtgagctgagatcgtgccactgcacttcagcccgggtgacagagcgagactccatctcaaacaaacaaacaaaatacaaaaattagccaggtgtggtggtgcgtgcccgcagtcccagctactctggaggctgaggcaggaaaattgctggaacccgggaggcagaggttgcagtgagacgagatcacgtcacagcactctggtttgggtgacagagcgaggctatgtctcaaaataaataaataaaaataaaataataaaataaagtaacataattgtgaaaagcaatacttttcaaaagcaatacttttaaatacttttaaagctggacacagtgactcacatcgctaatcccaacactttggaaggtcaaggtgggaggattacttgagctcaggagtttgagaccagcctgggaaacagagtgagactccctctctacgaaaaagaaaaaaaaattagctgggtgtggtggcagcacctgtatcccagccactccagaggctgaggcaggaggatggtttgagcccaggaggttgagcctgcagtgagccgagatctcaccactgcactccagcctgggcgtcagagtgagaccctgtctcaaaaaacaaacaaacaaagcaaaattaaggcaaaaattcatgaagatcaaaatattgaaattttaagacaggatctcaccatgtacttgcaagagcctacctctcctgcctcactctgtttctggcccctcagggggactcatgctctgaggactttcttttttttttttttttgagacggagtttcactctgtcgcccaggctggagtgcaatggcatgatatcggcccactgcaacctctgccttccgggttcaagcgattctcctgccttggcctcccaagtagctgggattacagatgtgcatcattatccccggctaatttttttaaaaattatttttagtagagatggggtttcaccattttggccaggctggtctcgaactcctgacctctggggatccacccgcctcagcctcccaaagtgctgggattgcaggcgtgagccaccacgcctggctaacggctctggggactttcacacgcgcgttcacacacactccagtgcggacccacgatctgtgcacgcagccggcaggtgagccctgggcacatgcatgcaaacctgcccacctccctgcacgtgtgcatctgcgcctacgtgcacctgccccacctcggcttcccagagcgctgtccctgcccgtccccactcacggtcgcctccggtcgcaggcctcctggcttcggtggaccagcgggggcccccgcacacgcgcactagcgcgcgtacgaagtggtggccgcacaacttctcacgcatctctggggtgggcgcggggcccaacgcgaacaccagggcagggcccagcagcaccagcgcccaggcgggcagacgggggtccatggtggtgggtggcgccggggccaagcggggaccccctttataggcgcctgggccgtcccagctgggggccttggagaagggacagaacattcttcaggaccgcccaggaaaaaggtcaagggtggggttagtgccagagcctttctcccagggccagggccttggatgtacttctcccagagggagcactgggcaacgagtctttcttttttatttttttcttctttttttttgagatggagtctcactctgtcacccaggttggagtgcagtgacttgatctcggctcactgcaacttctgacacccgggttcaagcgattctcctgcctcagcctcctgagtagctgggattacaggtgcgcaccactatgcctggctaatttttttttttttattttttatttttagtagagactggggttcgccatgttggccaggctggtctccaactcctgacctcaagcgatccatctgcctcggcctcccaaaatgctgggattacaggcatgagctgtgcctggactattattatttttattattattattgagacaaagtcttgctctgtcttccaggctggagtgcagtgatgcgatctcggctcactgcaacctccacctcctgggttcaagtgattctcccacctcagcctcccaagtagctgggattacaggtgtaagccaccacgcccagccacctatttttattttttatttttgagatgagttcttgctctgttaccctggctggagtgcagtggcacgatatgggctcactgccacctccctatccctgactcaagcaattctcccacctcagcctcctgagtagctgggactacaggcccacgccaccacacccggctaattttttgtattttttttgtagagatggggttttgccatgttgcccaggctggtctcaaactcctggactcaagtcatcttcccgcctcagcctcccaaagtcctgggatcacaggcgagagcgaccacaccagggtatttattcatttttgacataggatctctctgggttggcctgtaatggcaggatcatagctcactgtaacctcattcccctgggctcaagcgatccttcagcctctgcctcctgagtagctgggactacaggcctgcaatacaatgcccagctaatttttaattttttaatttttatttttatctttttagacagagtcttactctgtcacccaggctggagtacagtggtgcgatctcgactcactgcaacctttgcttcctgggttcaagcgattctcctgcctcagcctcctgagtagctgggattacaggtgcccaccaccaagcctggctaatttttgtattttttagcagagacggggtttcaccatgttggccaggctgatctcaaactcctgacctcaagtgatccacccgcctcggcctcccaaagtgctgggattacaggcgtgcaccaacgcgcccggccatttttaattttttaattgtagaggcaggggtcttgctatgttgcccaggctcatctagaactcaagtggttctccctactcggccttccaaaatgctgggattacaggtgtgaggcaccacacacggccaagtcttcgctattgtcttaaccagtttaaagagatgaaatagatcaactgaaaagtaataatcctgccttttctggggggcaggggggaagacagcgggcatcttccaagaccagaaatgttcagaattttgttgtttctattactgtacaaatgagaaaactgaggcacacaggccaggtgcagtggctcatgcctgtaatgcaagcactttgggaagatggggcaggtggatcacttgaggtcaagagttcgagaccagcctgcccaatatggtgaaactctgtctctactaaaaatacaaaaattagccagatgtggtggtgcatgcctataatcccagctactcgggaggctgaggcaggagaatcacttgaacccaggaggtggagattgcagtgagccgagatggtgccgctgcacaccagcctggggacagagactccgtcccctcaccagacaaaaagaaagaaaagaaaagaaaaaaagaaaactgaggcacagagaaaggaccccaaacttgcccaaggtcacaggaggctgagcagagcccaggtcttctcaaggcgcctgacacgcagggctgggggtgtcccatccgaagctctgtctccccaacacggttgtcccctctgggtgagcaggggctggtggacccagaatagagcaggatttatttgttcagtggatgcttggcccccgcttcatgcctagggggtcttatagctttgtttttccaaggagggaatctgaggttgagagagggaaggatgcttgaccctaggcaggagagaacctgggctggaactcgagtcttgcttgaccccagagcagctccctccctatttctaccaaattagggggccctctggggctaagagagcagggacagggatctctctctctctctctctctgagtctctctcggccttcatctctcagtttccttctgtatgtctgtctctgtccgcatttttcttttttttgaaacggagtcgctctgtcgcccaggctggagtgcaatggcatgatctcagctcactgcaacctccacatcccagtttcaagcaattcttctgtctcagcctcctgagtagctgggattacaggcatgtgccagaacaccaggctaatttttgtatttttaatagagacggtttcgccatgttggccaggctgatctcatactcctgacctcaagtgatcctcctgccttggcctcttaaagtgctgggattacagacgtgagccactgagcctggccactctccacatctttctagcagttatgaggtgcacatgacgggggccggtcggtggggaggtggtccggccccagtgatgctggtcccctccccacagcctcgctcccccaacctggccttgtcctctgaccaccgggagagcatcctgttccttccccacccacagagagcctgtaatcagctcccccaggctgcagccaaggccagcagctggggctgggagtgagggggctctgtccttgagggccccagccaagccccacccagtggtcctcctccaccagcctgccctggggcccccacagtggctccctgagaggtctctggcccacagctctaaccgcatccctcccagctcacacaccctctgaggctccccatcgccccaagtccagcacaaaatcttttccactgaattcctttattcagtcaacaaacatttccagagccccctctgtactgaggcctcagcccagcccccaaggaaccctgaggtcaggggagacagctggacacagacacttccccagccccagggccagagtggggctggagggaaggacagggctacagtagtagtgggggtatatgagggaaggctgcaaggatgtggtagctggagttttgagagatggataagagttttccaaggaggcaaaagtggcagaaaagctttgcaggtgaggaggagcagcagaagcttaacctgcatgagaatccctctcaccagtcagaaagttgaccctgcacagccaaggggtaagctctgaccattttgcaggggacagaactgagacccagagagggaaaggaacttgcccactgtcacactgcatggaaggggcaaaactgtaggctccaatacttgggctcttaacctccttactctgagccttctcacgcttggcatgctgttccctctgccaggaatgcctttccttcccttgattgcgtgaaaagttcctgccaggtttggtgtcatccctttgtgccccttgtagggtgaggacagaaagggtcccattggacaggtgggaaaactgaagccctaggacactcagataccattagggtggactgggaccccagcctttcctgccccctttcaggatcccaaagagatacacgggctcccctaaaaggcagagtcccagccacagcaactgctcttgtccttggcttcctccagagaaacagagatcggggagcagaagtcagatcatacatttaaagctacatgagggccgggcgcagtggctcatgcctgtaatcccagcactttgggaggccgagacgggcagatcacgaggtcaggagatggaaaccatcctggctaacaaggtgaaaccccgtctctactaaaaatacaaaaaattagccgggtgtggtggcgggcgcctgtagtcccagctacttgggaggctgaggcgagagaatggtgtgaacccaggaggcggagcttgcagtgagcctagattgcgccactgtactccagcctgggcgacagagcgagactccgtctcaaaaaaaaaaaaaaaaaaaaagctacatgaatgtccccattggaaataagacaggaaactcaaaactaggtgctgtagtcccagctatttaggaggataaggcaggaggatcactgtagcccaggagttcaagaccagcctgggcaacgtagcaagatcctgtctcttaaaaataataataataaatttaaaaaaaaaaaagcctgggtgcagtggctcatgcctattattccaacactttgggaggctgaggtgggaggatcacttgaggttaggagttcgagatcagcctggccatcatggtgaaacctcatctctattaaaaataaaaaaaattagccgggtgtggtggtgcacacctgtaatcccagctactcgggaggctgaggcaggagaatcgcttgaacctgggaagcagaggttgcactgagccgagatcgcaccactgcactccaccctgggtaacagagcgaggctctgtctcaaaaataaaaataaaaataaaaaaaataaaaagagagagacagaaaaggaaactcagggggccagggcttaaggggttgggaagatgcgagagtcttaaatttggttccttgcttctttgggccaggactcagagagccccactgacacatatgcccatctgtcttgaaccttaacaaattgcaaaggccacaggctattctacaggccacgggagcccccccaaatgcaatgtcatgggggtgttcctgaagtagaggaccctcataaggcctctgaggcccagagaggggcagctccgggcctaaggtcacacagccagtcaacagagacctaatccagaggtctgcgggcaggagctatgaaaaggacagggagtggtgtttgccctctgggtgagcagtgaaggcatgagtctcacacccccggcttccgctccacagcatgtccagctgggggcccagggcgctgaatgatggccggtcctgtgggctaggggcccagcacagcttcatgagctcgtgaacctgaggggcgggggacagataatggggtcgtgcctgagcagtccaaaggacacaactcccattcagcgtatttgtttttgtttttttgagacggagtctagctctgttgtccaggctggagtgcaatggcatgatctcggctcactgcaacctccgcctcccgggttcaagcaattatcctgcctcagcctcctgagtagctgggattataggcacgtgccaccacgcctggctaattttgtattttgagtagagacagggtttcaccatgttggccaggttggtctcaaattcctgatctcaggtgatccacctgtcttggcctcccaaagtgctgggattataggcatgagccaccgcactcattcagttttaaaacacaaattaaattccatcccatctctgctccaaaaactcccatggctccctatggatcttacttatttatttatttgagataaagtttcgctcttgttgcccaggctggaatgcagtggtgcgatctcggctcactgcaaaccctgcctcctgggttcaagcgattctcctgcctcagcctcccaagtagctgggattacatgcacacaccgccacacctggctaagtctgtatttttagtagagacggggtttcaccatgttggtcaggctggtcttgaactcctgacctcatgtaatccacccacctcggcctcctaaagggctgggattacaggtgtgagccaccgcgcccagcccttatggattttacaacacacttctcctttcgagactaccctgaccaacatggagaaaccccatcttaactaaaaaaaaaaaaaaaaaaaaaaaaaaaaaaaaaaaaaaaaaattacaggtggcgtgtgcctgtaatcccagctactcgggagtctaaggcaggagaattgcttgaacctgggaggcggaagttgtggtgagccgagattgcgccattgcactccagcctggccaacaagagcaaaaccacgtctcaaaaaaaaaaaaacaacaaaaaaacaccacctctccctgatgccctccttcgctcatctccatccctccttccctcatttgttccgggcagtcacatctgcctccatcgcactggtgcttaaaggcacccagctcattacctccccaaggcctttttcccttccgtgtcctccactggaaatttcttctcctagctttactcatgggtaggctcctcctccttccagcgtcggccccgtaagaggccctctttgaccacccccaccccaccatttccctctgttcatctctttcaaggcacttatcactaccataattttgtctttgttttgttttgttttgttttgttttgttttgttttgttttgttttgagacagggtgtcactctgttgtccaggctggagtgcagtggtacaataatggctcactgcagccttaacctcctgggctcaagcaatcctcctgcctcagcctccctggtagctgaaaccacaggtgcatgtcaccacaccggctattgcttgtattgtttgtagagacaaggtctcactatgttgcccaggctggtcttgaactcctgggttccagtgatcctcctgcctcagcctccctagtagctgaaaccacaggtgcatgtcaccacaccggctattgcttgtattgtttgtagagacaaggtctcactacgttgcccaggctggtcttgaactcctgggctccagtgatccttctgcctcagcctcccaaagtgttgggattataggcatgagccatcgtgcccagcctagaatgttcttatcagattttgctagttactgggaggacagggtcttcagcacccaacaagtcctggcacacagttggcactcaataaatgtttttggcctgagcaaattaatttatcaatgaccaactgcatgtcagacacttccacaaaggttatgattatatgattataaaccatgagagggtgggatgtggtggctcacgtctgtaatcccagcactttgggaggccgaggcaggaggatcacttgaccccacgagctcaagaccagcctaggcaacacagagagaccccatctctttaaaaaaattttttaaaattagccaggcacagtggcttatgcctgtaaatctcagcactttgggaggccaaggcaggaggatcgcttgagcccaggagttcaagaccagcctgggcaacatagcgagaccttgtctcttaaaaaaattatttttatcttatttgtttgtttatttatttatttatttattttgagatggaatcttgctctgtcgcccaggctggagtgcagtggcatgatcttggctcactgaaaccttcccctcccaggttcaagcaattctcctgcctcagcctcgcaagtagctgagatcacaggcacccacacatgggtaatttttgtatttttagtagagacagggtgtcaccatgttggccaggctagtctcgaactcctgacctccggtgatctgaccgcctcagccttcaaaagtgctgggtttacaggtgtgagccaccacacctggccaaaattatttttaaattagccaggcatggtgatgtacacctatagtcccagcactttgggaggctgaggcaggagaatcgcttgagcccacgagttcaagaccagcctgggcaatatagtgaggctcccatctctaaaaaattatttttaaattagccaagtgtggtggtgtacacctgtagctcctgctactagagacactgaactaggggaatcacttgagctcaggagttggaggctgcagtgagctataattgcaccccagcctgggcaacagagtgagcccccatctataaaaaagaaagaaagaaagaaaaaaaaaaaccatgaacgtcaccaccatttatggagcatcgactgtgtgctcggctttgagctgagccctcataggcacaggtgttcaggagtctaatcttccctcaccctataaggcattactattctcattttggaaaagggtaaactgaggctctgaaagtgctctgacttgccacacagtgagagagtagccaagtgggggccaggatcctcatcggcctcacactctagcctttcttctcagtacagagactcaggcgccagctggcttgcccgagaccccggcccaatctacagactgggaaactgaggctagccctgcggcgctcacctcagcagggcaggcaggaggcgccggcagcctctggccctcctccagcagttccaagaggcggcagagggcggggacatcccgctcacatcccatcatccgcaggaactcctggagccaaggaggagcgcatgtggtgggggaggagcctccgtgggtggagggggaggggccacccgtggtgggggtaggggccatctgtgatggagcggggaggggctgcctgaaccgtgaaggggtcagaaaggtgaggaagcgtcctccccactggggcctatgatgctgggaccaggtgaccccatgctaaagagggacgcaggcgcagacaggttggagattggccacgaggggcgtggagggagaagaaggctgggggctctgggaagccgactcacggccgaggggctgcagcttttgtcgcagtaggtgaagagctcgtacaggacgaccccgaagctccagacgtctgactggcgagagaagatgttgtccgagagggattcgggggcatacctggagaggggacaaggtcttgagatgcgagggtgtagaaaggacaggaagaggggggcagccttggaatggggaactggtcagggtaggtggggactgtgagcaggtcagtcccgtctccagggtctcggtttccctggctgtgggataggtggattctccagccctgggaggtgcctgggaagagctaaggctgtggggaggaggcgggggcagcacggaggggcggagatgggggcggggccagagccgtgggagggggaggggccagaactgggcggggggaagggcggaactaagagggggccagccctgaggggcggagccagcgtgttggaggggtggggttctgaagcttgggcggggcgagagctgagagaagggcggggctaaggctgggggccgctgacagcagggcagcgggagacagaggagccagtgctgttgagggggcggggctctggggagtgggaggggccaaagctgcagcggaggaagggcggggctaaggctggggagcaaagcagcgggagggggcgggggcatggctgggggcggagccagagccgtggggaataggggcggagcctaggcgcgggttccccaccagaaaatggggctctggcctggctcgcggaccacgtagtagtctttgtcaagcggcagcagcttagctaggccgaagtcagcgatcttgacgtgtgcctcgctctccacgaggatgtttcgggcggccaggtcgcggtgcacgcagcggcgggagcccaggtactccatgccctgcgggcgggcggtgtgagcgtgcagagaggatcccaggataatccggcaggtaccccaagcgtgacctggcaccccaacccagaccccaactataaccctacccccgagccatcctccactgaagttctgatcctgagccctaagccaaccccaccactcccgagacctggaccccaaaccactcctcagccttcaccgcgacctccaagcagacccctgcccaggccgtgccagctgaatccccacaagtcccggggcgccccctcgcaccttgcagatctgcgaggaatagagaaggaggcggctggcatcgaggcgcgcgcggtgccgctgcaggaagtcgcgcaagcagccgctgggcaggtactccatgaccagccgcaggctctggcggcctggagaaggcaggatctgtcacagcagggcccagccctgctcgtccccccattcttcccccctttcacagtgggaccttgtgtccctctcgacctcagttttgctgactgtaatatgggaaccgcaacaatgacacattgctaatatctcttgagtactttctacaacatacattgatgtgtttatatatcacggccaggtgcagtggctcacgcctgtaatcccagcactttggaagcctcacttgaggtcaggagttcaagaccagcctggccaacatggtgaaaacccatctccactaaaaacacaaaaattagccgggtgtggtggcacgctcctgtaatcccagctactctggaggctgaggcaggagaatcacttgaacttggaaggcagaggttgcagtgagccgagattgagccactgcctccagcctgggtgacagagcgagactctgtctcaaaaaaacaaacaaacaacaacaacaacaaagtaaatatcacaatggcccatttttcagctggagaaactgaggctcagaaaagttaaggtttcacaactggtaaggggtagagtcaggattcaaacctgtaacccatgtgaatctggatcaataatcacgttcccagcctacctaaagtggcctggcaggagggtaagaatgtgcactttgaaaagcacccatacgtcttggttcactcatccgggagctggctcacccgggccatagctgacaccacgatacttgacaatgaaatcactgtgcagtgctttgaggatctgaatctcccgctgaaagtccctctgctggtctggcccgctgtgctgcagctgtttcacggccaccagggcacctgtattgtcgcctagcgggtcatagcggcacagctccacgctgccaaagttgccctgggggatagcgggactgatgtccaggcacctggatgctgccctgccctctccaacccaccctggccctgcccaccttaccttgcccagctgtgagatgtacttgaggtgtctctcctcgaagatcgtggggtcttggcaggcatagagctgggcaccattccacagcccatcacgaggtgccagggcaccaggtgtggggtctgagaggagctcatagtctggggtgggggcatgggcagtggtaagcagcgcctctcatcctgggccccactcctgagttgacttgctgtgcaacctccatctgcatattgaccctctctgtgcattatggcagggccattgcaagccaaagggtaccttgtggagactggaaaaaggtgtctcccactctgtcccaggcaaaggaagcctcctcgtgcagtgcacaccctgtgcaactccacatggctacaaagatggaggacataatgagaactcatttccccagttccactgctatgaaatgtggccacatgactgagctcaggctgatggacaagatatgctgggtgcccctccagtcctgacccatggaaacctaatacggggccctccacactctctcttttatctgcagaggatccaacggggacccaacgcctgaggtgagtgcagccactaagtgagaggttcctgtgggcctggacaccctcattgaatgaagactaaatatcacactgggcatggttgtgtgtgcctgtaatcccagctatttgggagactaaggcaggaggattgcttgagccagtaattcaagaccagcctggggaacatagcaaaaccccatcacagaaaaaaaaaaaaaaaaaaaaaaaatccagcctggtgtggtggctcatgcctgtaatcccagcactgggtggctgaggtggacggatctctttgagaccaggagttcaagactagcccggccaacatggcaaaaccctgtctttactaaaaaatacaaaaatttagccgtgtttggtggcacgcccttgtaatcctagctacttgggagtctgaggcgggagaattgcttgaaccagggaggcagaggttgcagtgagccaggatcacgccactgcactccagcctaggtgacagagggagatagtgtctcaaaaatataaaataaaataaaataaaaatgcatacaggcatgcatcaccatgcctggctaattttctgtttgtttgtttgtagagatggagttttgccatgttgcccaggctggtcttgaactcctgggctcaagcgatccacctacctatagctggaactataggcatgagccactgcgcccagccaaacatttttttaaaagaatgaaatagaccagacatggtggctcacacctgaaatcccagcactttaggaggtagaggtgggcggatcacctgaggtcaagagttcgagaccagcctagccaatatggtgaaaccccatatctgccaaaaatacaaaaattagctgggcgtggtggcacacactgtaatcccagctactcaggaggctgaggcaggagaatcgcttgaactagaggttcaaggaggtagaggttgcagtgagccgaaattgtgccactgcactccagcctaggcaacagagcaagactctgtctcaaaaataaataaataaataaaatatcatcatgttgaaccttgaactgaggggactgttcgttacagtagctgttgaagctcacactgactgtcacagtcaccaacccctccaacctcaccagacacacagggcgtggcctgctgcaaaccacgctccttccactgggcccaatatgacatcacagccctccccacccaacccgtcccagcgggcacctgaagagatgaggctattgaggtcacgaatgacggctcggaaggagggcctctggaccggctcataggccatgcactgttgaatcagcagggccagctctgtccacttgggggccggcagctgctgccggtcctcataaaattggagtttctgagggtgagaggagcagtcggtaatccccaacccaatagacccaccccaatctccccagactggatgtcagtctgcccttctgtcaaagtgggggttcggagaccgatgccgggtgaggggctctgaccttagcaggatccagggcactgatgggcatggtgacgccactaaacacttcccagaccgtggcgccgaagccccacttgtcagcttccaagctaagtgtctgcgcctcccggagacactcgggggccacccaggggatcctgtcggtgagcactgagggaatgaaagtgggatcagggatccacttccttgccctgctcagcccctccctcctccacctccaggaacttactctccaggcttaacacagcggggctgaccccagggtcactcagcttgatgaagggcgggctcccatcagccccctcccgagccaggagcaccttccgggcagagacattgccatggggcaggcctttgtcctcctaagggggccagacacaggaaaatgcccgggagggtttgatgaatgaagagtctgtttggcaaactcctatacatccttcaaaacccacttggtactgctcagacatgctccagcatcgtccctgactcctgacatcctgtcttgcccctctagttcaccccctacactgacctggctatgtccctccccttctcaaacaccaccccatcctgtgactccccagtgcctttgacacaaagtgaaagctcctcagcctggcattcaaggcccttgctcaagcttccaatgaacttcccttccacacttgcaccctggtctcctgccaacagaactgcctgataggccccaggggatgcaacacactatctagcctgcaggcctttgcctaggctgttccctcagcctgacattccttccttcctttcttctcttgatgaacttctactcaacttttaaggccctatctccaatgttccttcttctaggaagcctttcttcctgcccagcctcgtcattcaccacacgccctgacatccaagaatgacttgttctcttctagtgttctcacaacctgaacctaaaatgccctcccctcgaacccttaccaaactcctatgcatactacagagcccactcccaattcctcttccacccagagaaagccttccctgggaatggagggtggagcaggcagaggagcactcaccagatagttgagggcgtaggccagctgtttgaccacctgcagcttccagctggctggcaccaggtggccacgttttcgcagatacatgtctatggcccccaggtgtacaaattcctgcaccatggtgcctggttggcagcagggagaggcggggttgggagactgaactgcacttgtgttgaggaggttctgccaacaccctggctctcagggtctctcaaactctcatctctgtctgttccctcccctgctgcctctgttcatacagtactcacctctcctcccacctccatctctgaatgatttgcctggaatgcctggaaggtgttgagccctgtctgtatctgtatctcacttttttttttctcttttcttttgagacagagtcttactctgttgcccaggctggagtgcagtggtgcgatctcggcttactgcaacctctgcctcccgggttcaagtgattctcctgtctcagcctcctaagtagctggaactacaggcgcatgccaccacacccggctgattttgtatttttagtagagacggggtcttgccatgttggccagactggtcttgaactcctgatctcaggtgatccactcgcctcggcttttcaattacaggcatgagccaccacgcccagcctctgtatctcacttctaaccctttgcatattctgtgtcctctgcctagaacacccctcttcctttcctaatccacacttgtccttatctttccaggttagaatgcatctctgtcttcccacaagcattgcccaacccccaggctggcccagcagcctctctgaccatccacagtgctccgtgctgccctcctcacacctcatcacaccctgcctgtcacattctaggctctgtcccagctcctggcccatcctagactcccaaccaatgaaaccaaggctcagaaaggttacgtgacctgtacaaagctgcagagattagaaagccaggtttgtctgacttcaggtcattctggggctggatatgggtgagaacctggagccgctttccaaggagtgatgatggagagacataaataaagggtaatgaacacggctcccatccagggtggcccagtgtgttgctggggctgtcatatagcggctcagaacagaggtgggaagaacagcctagacttgggtgaggcaggggtggggtgggtgggtggggggctctcactgtctccagccatgcacacgccgtggagcagcacgagatgccggtacgacacttggctcatcaagctcgctgcttccaggaatgactggggaaggtgggaagggagagaagatgcgtgggtttcttccactccaataatcccaaattttgtgctcacagacctgccttaggggaacacctggccacaggtcacctttggccctggagtctgccattagtgcacacagcactaccatgattttctgatacgggacagaagttcccactatcatctatggttttttgttttgttttgttttgtttttgagacagagtctccctctgtcacccaggctggagtgcagtggcgcgatcttgactcactgcaacctccgcttcccagattcaagcaattctcctgcctcagcctcccgagtagctgggattacaggcatgcaccaccacgcccggctaattttgtatttttagtagagacggggtttctccatgttggtcaggctggtctcgaactcccgacctcagatgatctgcccgcctcagcctcccaaagtgctgggattacaggcgtgagccaccgcgcccggcctaaaatttttttgtcaagacgaggtctcgctatgttgcctaggctgttcttgaactcctggcttcaaaccatcctcctgcctcagcctcccaaagtgctgggatgacaggcatgagccaccacgcccaggtccctgtgtgtttttaaatttctctgcatccacgaccccctctccagccagccccgactccaaaagtctggtccacattgctctcacctccatgcagttcttgtgcttggcatccatgaccttcagcagcacctctgtctttcgggcctccccatccaccacctcatggcgacagccccggtaaatcttggtgaaggacccatggcccaggttctcatgctgaatggtgaggggacagcagaagaggccagtgagggggttcctgcaggatcccagcccaagcgagacatagctgctggccccattttacagatgggaaaaccgaggcaaggtaaaattatagcatatgcctgaggccacgcatctgagtctctggaccccagactgaggtatcgcctcatttcccagggcctcttacccactccaggctgtcagcagggatcttgtgaaatgtcatctgactcagctggtattgggattggggctgaaccaaggatgatgtgggtgggctgtgacctctctggaccacgatcaggttggacttttctatggggagaggatgagggagaaaaaccagaaatcagaggtgaaaagtccccaagggttagctaactcatgccttagtttgaggtaccctctagaagccgaccctgagatgaagacttcagggcacatggctttttgttgttgtttttgttttgttgttgctgctgctgttgagacggagtctcactctgtcatccaggctgggtgggcagtggtgcgatctcagctcactgcaacctccacctcccaggttcaagcgattttcctgcctcggcctcccgaatagctgggactacaggtgtgtgccaccgtgcccggctaatttttttttttttttttttttgagacagagtctcgctctgtcacccaggctggagtgcagtggtgtgatctcggctcactgcaacctctgcctcctgggttcaagtaattctcctgcctcagcctcccaagtagctgggactacaggagtgtgccagcacacccagctaatttttgtatttttagtagagatggagtttcaccatgttggccacgctggtctcaaactcctgacctcaggtgatccatctgcctcagcctcccgaagtgctggtattacagacgtgagccactgtgcctggctggcacatggtttatttgaaaggagatccagaaagcccccatagggatttgggatgagcgacaaggaaggaaggagccctgcagggggctttaatgagcaagtggcactgtggacaaccagggatcggttctaccagggattctgggagactcagaagaactcacatctcagaattgtcccatcagaggggtttgtccaggagtgaaattcacccagaggaagagctgagagctggagagagactaggtgcagatgacatggctcacatctagctgtgcctagatcaagccagacctaaaggttatatatctctaacttcctgagccaacaaatcaccttttcttccctaacccaccttgacctgcagtttctgccacttgccacccacacaggagctgtcacagacatagaaagccagggtcccagatcagccactcattccaggggaggaaggggctcacctttgggtctggggatacagcaggaagtgagggtcactgccaccccatctacgtgcagccccccatcccagcaggttgccaggagctctcgaagactgctgtggggtcggctgaggccaaccagaaggaaggttcctgtggggctgcgccggatgaggcagcccttataatcaggaccaagggggttctgcaaagaagagtggcccctgagtgggactgagcgacagacactctccttctcagtccttcttccttttttttctttttttttttttttttttggagacggagtctggctctgtcacccaggctggagtgcaatggcgtgaccttggctcactgcaacctccgcctcccaggttcaagcgattctcctgcctcagcctcccgagtagctgggactacagatgcccactaccacgcccagctaagttttatatttttagtagagacagggtttcaccattttggccaggatggtttcgatctcttgatctcttgatctgcctacctcagcctcccaaagtgctgggattacaggcgtaagccactgtgcccagcctcagtcctttctcctaaagcaccatgaactcattccagtctttagacctttgaatatgctgttctgttcaccgggggtgtcttttccctcctattcttcaggaaccaaatgctgactgatcttttaaatctcaattcaaacgtcacctcctccaggcagccctccactacccaccctagcagtagaccgacctggacacagacagtgaggaggaagctgtcaaagtcctgggggctgcggcggagaacataggagccaggacgtgagcccccagtcttgagcttgttgatggcaaagtccagactgtgggggaaggtgagagggaatggggaggagtcagagatagaagaagacagagagacctgggctcaaattcaggtacctctgtagccctgggatccttgccaggtgacaccctccccccatttataaaatcagccatgggccaggcgccgtggctcacgcctgtaatcccagcattttgggaggccgaggcaggtggatcacgaggtcaggagatcaacaccatcctggctaacaccgtgaaaccccgtcgctactgaaaatacaaaaaaatagccgggcgtggtggcgagcacctgtagtcccagctactcgggaggctgaggcaggagaatggcgtgaccctgggaagcagaggttgcattgagccgagatcgtgccactgcactccagcctgggcgacagagccagactccgtctcaaaaaaaaaaagaaaaaagaaaatcagccgtaagtcttggcctcttctgggagattgtttgtttgtttgtttgttttaatagagacagggtcttgcttggttgcccaggctggagtgcaatctcagctcactgcagcctccaactcctgggctcaagtgatcctcctgcctcagcctccggagtcgctgggactacaggtcaaccaccacacccagctatttttttttctttttttgtagagatggggtctctcctgttgcctagacttgtctccaactcctgagttcaaacaatcctcctgccttggcccctcaaagcgctgcgattgcaggtgtgccccactatgcctggcccttcctgggagattaaacaagaggctgtaggtgaaggtgggcgacttgtccatctccaggaaatggccctggggtcagagagagagagagtagtggtcgccctgtgaagcagaaggaatacttcagcttcactgagcgctgactgtgcggcaggtgtggtttgaaaacttgacccctgtccagggctcctggaaggtgaggacactgaggcatagagaaggggaggggccctgagtggccacagaggccgggaatgggggacaggtccttacgtgatggggccgtggcactgctcggccacttcctccagcagcctcggcggtgccacctccttgcagaagaagtgctgggagtccgtggtcagccggaagtagccgtccacgagcgccacgaacgacagagcctcgggcagccctgggaactcggcctcctgcgagggacaagcgtcagagcccagtgaaacccgagggtgccggtcccgccctcggggtaaggctgaaggggaggggaatcctgcacccactaaaatctggttgtctgtcctggtaacagtgaccaggcggtgctctccggccgggccaacgcgcggggcctgcttgatgctaatgtctacgatttctggaaagtcgcagaagggctggaggacctgggaaggagggggagtaccgaagtgggggcccagctggaccccgccaaaccacgcccatgaacccacccccaagccacaccatccactccctatccctttgccattcaacccttccaagccgcgccccctcctatcaactccaacctctcaacacctcccctacccatccccaaacatctcccacccgctctgccaatccccgcctccttctctctgccggaccccgccccttgatccctgccccgcttcgcagcctcccagctctcggagcctcactctgcctcttagtcttgcctcgttccagcgcccacccacccactcctcaacccctcccattttcattcccgggtcgctcagcccaacccttcactcagtttgcccctcccattcccgcagtctcctccctcactaagccccgcccctcattaagcctcgcccacttccccaagtctttcgttttggctccgccccacatcccctaccactctccggcccctccccgagccccgcccccacgttggccccgcccagcgggggagtccgccctcacctcctgttctccctgggtccaggcgatgccgccgtcaccagccacgcggagcagccccagcccgtcgtggccaccaagggccccagggaggcccacgtggaaggtctcggcggccccggctggatccagccgctccaggtccatgatgtacttggccatgagcgagtgccggtctgcctggcaggcggccacgcggcgcagggctctgcgcaccgtcctccgaatacgcctccgcgtcacgaagctcaggccctggatcaggtcgcgcaggcttgggggtaggcaggccttgtagctgcaggggttggaggggagggagccggccctcagcgtcgggaggggtccccgcggggacacacacaaacccaggctttagcccaggggctggggtgcggccctagttggggcaccaggcacacacagactctcattcagggtcaggtatgaggaccggacctcagagtaggggagggccattggcgcccacaggtcggacagggaccccacaggccttttagctgggggaggtcaggtgtctgtccagctggagcctgggggtggagagggctgggttcgtgggaggccctgggtcataggaacaccctgaaagcttgcaggagaactccatggtgggagcccggcaaagccccgatggagcccacgttgctcactcccaagcagaggccgtccccacagcctggtggctctcacctgacagtcttcagcagctctcccggccgctgggcctgctctcgcgccatccgggccaggtccaacacggccaggctgagacactcaccctgctccttgagactgaggcccacggggaggcgcccactcaccaggtcactgcggtgctggggggccgccacagggagcatcagctgaggccacccaacttcaagccctgttgttaacctgcagacccccccaatcctgggctgacccccacccctggactgccacagggagggtcagacgaggccccacctgattgcatgccagtcctcatgttgccccttggacccccaaccccctgggtcaaaccccaggcagaaccccacctgggcaaagaggtgctccaggactggcaggtcaaggatagcactggccaaatccttgcgtagcccgaagcggtggcacttctccagcccaaaccaattggggaagtaaaagctgtgaggagaggagagaaccctgggatgaaagtgcaacccagcctcagtaggagtgacattatggtgggggcgagggacagattctgcggaggcctcacagagcccagcttgtacctttaacttgctgtgtgaccttgggcaagtgacccaccctctctggtctgtttcctcatctgagaaatgggtagtgaccatacctccctggggcaggggtgtgggcacctcgaaatgcaaggagatgataaaattgtacaatccctgggggctggggggcacttcctaccgaatcctgtacagcaggacttgggtgctggcatcctccacggagaagatgtggctcggggggaaccagcaggacaggtcctccgtggccagagcaaagagggagtggtacacaggcaggatgcctacaggggatggtcccatcagctccctcctgagtcaccccatctgtgcccttcaggagtgccagcatcatacccaaccgtccagatccttccatacctcaaggtatgaccagctgttcccttcatgtgccgtcacacctctccgtctgcacaggccattccctctgcctcagaagccaaccctgcacacccttctccattacaaaactcctactcatcccccaaagccccagctccgatgctgacttctgcaggcaactattccagcttccaatcttggccccacacagccccatccttccctctggcccgatccactagggatgcactcaccgctggccttggcagcctgcacgcacaggtcctcagccaagtggtccccaaaggagaaagataggcgctgggggggcccggggccccgagcgggcagcagcacatgcagggcaccagcctccgtggacaagaggctgcatgaacgctgagggatcaggggcgtctcttcacttggaggtgccatgagtgcaacttgcctggggcacagagagaaaaagcccctcagtcctggtcagaggggattggacttctgagcagggagggcatggaaaggagtgctggaggccgggtgcggtggcttatgcctgtaatcacagcattttgggaggccgaggcgggaggatcacttgaggtcaggagtttgagacctgcctggccaacatggcgaaaccctgcctctaaaaagtgcaaaacttagccgggtgtggtggtgcgttcctgtaatcccagcaactcgggaggctgaggcaggacaatcacttgaacctgggaggcagaggttgcagtgagccaagattgtaccactgcactccagcctggacaacagagtcagactctgtctcaaaaaaaaaaaaaaaaagaaagaaagaaagaaagaaagaaggaaagcctccctgggatgggcccaggaggaaactggccccctgcttccagcccccaacacctcccacccgctcgctcacttgccctgagaaacctcagcactcagggccctcagctgggtggggccaggggtggggcttcgagtcccctgagaaaaattggggagaaaaaggaggtcactcaaattgacctgaatgaagaagatctgaagaaagtgttgggaaaaacaaacaaaaacctaagttccagcagggcgcagtggctcatgtctgtaatcccatcatttccggaggccaagaaggaaggatagcttgagaccaggagtttgttttatgttttttgcttttttgagacagagtctcgcgctgtcacccaggctggagtgcagtggcgcaatctcagctcactgcaacctccgcctcccaagttcaagagattctcgtgcctcagccaccccagtagctgggattacaggtgggcaccaccacgcccagctaattttcttgtatttttagtagagatggggtttcactgatctcaaactcctggcctcaagtgatcagcctgcctcagcctcccaaaatgctggattacatgtgtgagccaccgcgcctggccgagaccaggagtttgaaaccagactgggcaatatagtgagacctcctctcaaaaagaaaaaaaagccttgtaatcccagcactttgacaggccgaggcaggtggatcacttgaggctaggattttgagacctcatctctaaaaaattagcagggcatggtggcacacccccatagtcctagctacttgggaggctgagacaggaggatgccttcagctctgcaagttgaggctgcattgagctatgatcacaccactgcactccagcctgggcgacagagcaagaccttatctctagaaaaaaaacacaatacaaaaactatgatccaaaataatgccctgtggctggggtggggcggcattaatgagggtttttttgtttttgttttgagacagagtctagctctgtcatccaggctggagtgcagtggcacaatctcggcttactctgcatcctgggttcaagtgattctcctgcctcagcctcccaagtagctgggattacaggggcacgccaccatgcccggctaatttttgtatttttggtagagacggggtttcaccatgttggcgaggctggtctggaactcctgacctcgagtgatcctcctgcctcggactcccaaagtgctgggattaccggcgtgagaaactgcgcctggcctaatgaggtttaagacaatcagaggactaggacccctaggactcagctttcgcagctgtgaaatgggctgactccccagcatcctcattgaggtggtctgctgagcgcaatccaggcctaaagtgtcaactcaattaatgtgcattaatttgtatatttcttgatgatgtgccggtaagcgatcaacaaacgcctgttaaaccaaacaggaagggcaattggcacagcggtgtggtggttactgtgggaagggaagtcttgtgggggaaagaaccttaccaaagggacactttgatgtcaccgatgcccagaccaagaatgagcacattcctagtcccgggaaccttggaggagccccatctctcccacagagagattgatgtctagttttgccctttatagaaataaaatcacacaccatagcctctctatcgtcccctcaacatcagccaatcaagttttttggtttgtttgtttgtttttttgagacggagtctcgcactgtcacccaggctggagtgcagtcgcacgatcttggctcactgtagcctctgcctcctgggttcaagcgattctcatgcctcagcttcccaagtggctgggattacaggcgcgcaccacagcgcccagctaatttttgtatttttagtagagacggagtttcaccatgttggccaggctggtctcaaactcctggcctcaggtgattcgcctgccttggcctcccaaagtgctgtgattacacacgtgagccacattgcccagcctttttatttatttatttattttgtaggggggaggacggattcttgttctgtctcccaggctggagtgcagtggcatgatctcggctcactgcaaactccacctcccaggttcaagcgattctcctgcctcagcctcctgagtagctggaattacaggcacccgccaccaaacctggctaatttttgtgtttttagtagagatagggtttcaccatgttgaccaggctgatctcgaactcctgacctccagtgatccgctggcctcagcctcccaaagtgttgggattaaaggcatgagccactgtgcccagccccagtcgagtttaaaataaggcttcagtggcagtggcgccccactgcaatcccagctactcagggggctgaggcagcaggatagcttgaggccaggggttagagacctgcctgaacaacatagcaagactcccatctccaaaacaacaaaaaaatcttaacagaatattattattctgtaatactgtaacaaaaaaaaatgaaaagtcagaggtgatgtttggtcccagaaaacgccatagtttttttggttttttaaaaatgtttgtagaaatggaggtctggctatgttgcccaggctggccttgaactcctggcctcaagctatcctcccgcctcggcatcccctgtttataatcctcaacgttctgcatcctggtatggtcgggtaccctgtgtctggaccgggaaggcctggagggtaggggctgggaactccgccccccaatccctccttcccaatccctcctccccacccccaaccccgcagcccccgtcgcgcatgcgcaatgactcctccaggtccgcaaggcaggcatctcccggccttagtcaaagccgaagcccagagaagcgagcgatcggaggatgcgagtctcggctcacgtctgcctcgcagctttcctccgaggcctggaaggcgagctagcctttgccctggcagcaccctgccccagcccagccatcccccgccaccaccatcctcccccagtgtctgggccgagccctgcggcatcgccagctcttacctagcgggcagggaccctggactttcgaagggcgggcagagccgggaggcagcgagaggaaagtcccactcggctccttcctgtgtgggccccttggtttcctgagccactgtcatttaccgaaagtcagggccctgcgggagctgggggcggggaggcgggcaaggaggggcagaaagttccggaagcctctgcatcagccgccccgttcagacaggctgctggagacccctaagccaaaggaactgatgatagcacagagaagggtctgggtcacaccaggggctcagccgactctagacccacttgttaagtggggctctggcccggcccttattgcctcagtttacccatctgtagcatgtgtgagttgggcacccagtggaactaattttgcacccagggaaggaaacctggctggatttgcccaggagggaagcagggaagttgccccagaggaaggtcaagttcttctttgaggtatttctcccttaagactcagggagacgctgggcgcagtggctcacgcctgtcatcccagcactttgggagactgaggcgggcgattacttgaggtcaggagtttgagaccagcctagccaacatggcgaaactccgtctctactaaaaatacaaaaattagccaggcgtggtggcctgtaatcgcagcactttgggaggctgaggcgggcggatcacttgaagtcaggagtttgagaccagcctggccaacatgatgaaaccctgtctctactaaaaacaggaaaattagccaggcctggtgatgcctgtaatcctagctactcaggaggctgaggtgggaggattgcttgaatctaggaggcggatgttacagtgagacgagatggcgccactgcactccagcctggcaacagagcgggacttcgtttaaaaaaaaaagaaaagactcagggagagataatgacccatttctgcctgtggtgccctgggcccagccctaaaaaaccaggtggatccggcctggcctcttggaacttgtgatctggcgctgagacaatgagcaaatgaaggagccaaatcatcgcagacaacaaagaaagccagggtgtcaggacaggcacagactggaacttggacccgaggcaggacagggagctggccagggaaagggtgctccaggaggagggcacaggatgggcaaagaccttgagagggcagtgatcttagcagcttgaagagcagtcaggaggccaggggcaggggtgagatgagggggaaggggactgcagggcggtcaacaggggcaagatcgtggggggacagggggatcagggtctttgggagaagggtgggttttgcctggagcataatctggagccacaggagagttggaagtaggagctgttataaatagaagaggcagaaggcccgggcagcatccaaatgcagagacttgggccagtgttcttaggataataggatcagagccccggaagtagagcttcaggaatagactgacgaagtggtgaccgggtacagtggctcacatctgtaattccagcactttggaaggcccaggtgggaagattgcttgagcctaggagttcgagaccagcctggccaacatggtgaaaccccatctctactaaaaatataaaaattagctgggcgtggtggcatgtgcctgtaatcccagctacttgggaggctgaggcaggagaatcactggaacccaggaggcaggcggaggttgtagtgagctgagattgtgccaccgcactccagcctgggcgacggagcaatactctgtctcaaaaaaaaaaaaaggaatagatttaagaagttgtggccaagaacagtggctcacacctgtaatctcagcactttgggaggctcaggcaggaggatggcttgagcccaggtgttcgagaccagcctgggcaacatggtgaaaccctgtctctacaaaaaatacaacaacaacaaaataataagctggatgtggtggcatgtgcctgtagtcccagctactaggggaggctgaggtgggaggatcacctgagcccaggaagttgaggctgcagttagctgtggtcatgccactgcactccagcctgggcaatgggagtgagatcccgtctcaaaaaaaaaaaaaaaaagacttttcatctctgtatcaccatcacaagtcttaacacaaaatggtttggtaagtattttgttgatcttaactgttcaatcagccagaggcttattggacacagcctgtgtgcagggaatcggggacaatgcagacccaatccctgtccaggggagctgacagtccagcaggggagatggcaataaacaagctattgcccaataattatatcagttgcccctgggaccggtctgctaagagagatgactggatctgggagggcttcctggaggaggtggctttgattctgaaatccaacaacaagtgggactagccagagagtgacctgagaatgtgggagtgtgggcagttctggcaggcagaacagcccaggcaaaggcctggaggcttcacgaattcacagtgttcctgagaagagcaggatgtcagggacacggggggctgagactcatttgatggcgtgggtagggccgcgtgggtcaagggaaagagatatagattatgtcctcagcttagtggagcttagtggagccacagctgacctgcggcaggaagtgccaagcagaagcttagttgtagtgttttctttcacttcctgggtggcttcagcagacgggaatgcaaccttatgttctcatccttggcctgaggctgaagcctctgctttccggaagtacagtgagtttctgggtctctgctacctccagtgtgatggtttctgcaatattttgagaataagtaagaggagattggggtgaggaccaaagtggtaccttcagccccagagaagggcatgtgaaggctctaaaaggaagttctggccgggcgcggtggctcacgcctataatcccagcactttgggaggccgaggcgggcggatcgcctgaggttaggagttcgagaccggccttgccaacctggtgaaaccccatctctactaaaaatacaaaacgcagctgggtgtggtggcgggcgcctgcagtcccagctactcaggaggctgaggcaagagaatcacttgaacctgggaggcggaggttgcagtgagccgagatcgcacaactgcactccagcctgggcgacacagcaagactccgtatcaaaaaataaataaataaataaataattttttttaaaaaaaggaagttctggggacagaacccagaacttgcccgagaaaaatggggcacgtcagtgatgcaaacacccagatttttctgctgacaagaagtccataaatacaatcaaagaataaaatacaatcaaagtgtaactggaaacaaaattgaactcatggataaaatatcctcgttatataagtaacatctagaaagcagtaagaaaatgccaaccagttaggtggatatgaatccagaagtcagagaaaatggaggacaaatagctcttaaacccagaaaaatttcctcagcttcacttgccaaatgaaaattaagagtacagtgaggcagggccaggcacggtggctcatgcctgtaatctgagcactttgggaagtcaacatgggaggatcatttgagctcaggagttggagattagcctgggcaacatggtgagatccgtctctacaaaacatacaaaaattagccaggcatggtggtgtgcacctgtagtctcagctacttggaagactgaagtgggaggatggcttgagtccaggaggcagaggttgcagggagccaagatagtgccactgtactccagcctgggcgacagagcgagactacatctcaaaaacaaaaacaaaaatggtaaaagactgaataacttcctcctgagattggaaacaagacaaggatgtccattttcaccacctctattcaacattgttctggtgatgttagccactgtaataagaaaagaaaaagcaggctgaggcaggagaatggtgtgaaccagggaggcggagcttgcagtgagccaagatcgggccactgcactccagcctgggtgacagagtgagactccgtctaaaaaaaaaaaaaaagaaagaaagaaaagaaaagctgggcatggtggctcacgcctgtaatcccagcactttgggaggctgaggtgggagaatcacaaggtcaggagttcaagaccagcctgatcaacatggtgaaaccccatctctactaaaaatacaaaaattagccaggcatggtaaaaatacaaaaattagccgtgcgtggtgatgcgcgcctgtaatcccagctactcaggaggctgaggcaggagaatcgcttgaacccgggaggtgaaggttgcagtgagccaagatcgcgccactgcactccagcctaggtgacagagggagactctgtctcaaaaaaaaaaaaaaaattaaaaattggcagggtgtgatagctcacacctgttgtcccagctatttgggaggctgaggattgcttgagtcagggaggacaaggctgcagtaagccatcatcacaccattacactccagtctgggcaacagagcgagatcctgtcttaaaacaaaaaaatatatgagaaaaataaacaagtcaggtgtggctgggcatggtgatacatgcttgtagcctcagctactggagaagctgaaatgggagcccaagaatttaaaggcaacatagcaagattctgtaacaagcaaaacagaataaaataagtaataaaaaaaaggtaaataaaactgttgctatttgctgatgatatgattgtttatgtcaaaaacccaagggaatctataagacaactactgaaattaatacataaattcagcaagttaccaggtttaaaaagtccgttgaattcaatacaaaagtcaattgaatttttatacaccagcagcaaacaattggaacataaaaaaattttgaaaaatttcctttgcagcagcactgaaaaagataaaatactgtgatggtctgagagtttgcgtctccccaaaattaatacattgaaatcctaacctcgaaggcggtggtattcagaatcggaaccttttaagaggtgattagatcatgagggttgagctctcatgaatgggattaatgcccttataaaagaggcccctaggctgggcatggtagctcacgcctgtaatcccagcaccctgggagaattgcaggctggtctctgacaaacaacttgtgtttgagaccagcctgggcaatgtggcgaaacaccacctctaccaaaaaaaacacaaaaattagctgggcatggtggtgcacacctgtagtcccaggtcaggagtttgaggccagcctgatcaacgtggagaaaccccatctccactgacaaaacaaaattagctggatgtggtggtgcatgcctgtaattccagctacttgggaggctgaggtgggagaatcgcttgaacccaggaggtggaggctgcggtaagccgagatcacaccattgcactccagcctaggcaacaagagcaaaactctgtctcaaaaaaaaaaaaaaaaaaaaaaaaggccgggtgcagtggctcatgcctgtaatcttagcacttcgggaggccaaggtgggtggatcacctcaggtcaggagttcaagaccagcctggccaacatggtaaaaccccgtctctgctaaaaatacaaaaattagctgggtgtggtggcgcacgcctgtaatctcagctactctggaggctgaggaaggagaatcgcttgaactcgggaggtggaggttgcagtgagctgagatcgcgccactgcattgcactcaaggttgcgtgacaggaaagaggctacatctcaaaaaaaaaaaaaaaaaaaaaagaaggccagggacctggagtccggagtgcatacaagtgggtggctttgcagtgttttgaggaccaacggtcagaaaccaagatttgggtgtcttgggcccagccttgggaaggcactggtgccagtaactgagatgagggaaagagtgggaaggatgaggcacatcagcattgtgaacgctccgtgatccaagctgtggcttggcccaggatcctggatgaacaaactggtgccttcaaagtccctgggaaaaagacaggggggacaggggtgcccttggacagccctgctaaccaggaactcctcgcctgggccccactggatggtgataacagagacacagagtagcccaggaccagcctgctcaggtcagattcctgcatggcccgaggtgggggcagaggaatcctgccaggccaggtgtgtcactaggaagccggggccacggcatcactcaggcaccgacaacatgtaaaagaaagaaaaataataaagcttttttttttcttttaaattaagacagtttcactctgttgcccaggctggagtgcagcggcatgatcttggttcactgcaacctctgcctctagggttcaagtgattctcgtgcctcagcctcccgagtagctgggattacaggtgtgtgtcactgcacccagctaatttttgtatttttggtagagacggggtttcaccatgttggccaggctggtctcgactcctgacctcaagtgacctgcccgcttcagcctcccaaagtgctggggttacagatatgagccactgtgcccaaccaaaaagaaaaataataaagctctgggccgggcgcggtggctcacgcctgtaatcccagcattttgggaggctgaggtgggtggattatctgaggtcaggagttcaagaccagcctgtccaacatggtgaaaccccgtctctactaaaattacaaaaattagccgggcgtggaggcagatgcctgtaatcccagctactcaggaggctgaggcaggagaggatggcttgaacccaggaggcagaggctgcagtgagctgagattgtgccactgcattccagccttggcaatggagtgagactccgtctcaaaaaaaaaaaaaaaaaggaaacaagaaaccctgtctctacaaaaattagccaggcatgatgatgggtgcctgtaatcccagctactctggagggtgaggcaggagaatcgcttgaacctgggaggcagaggctacggtgagatgagatcacgccattgcattccagcctggggaacagagtgagactccatctcaaaaaaaaaaagaaactaaagaaaaataataaagctttgaaacaaacagcacatcacgacccgtgcccttccccaccctggcatgcccctccctccactccaacccaggccttgaaggcagaagcacgaggccccaaggccagggctgggtctcagggatctccctctcgtcttcttcctcctcccctgtcctccctaaattccttttcctgccccgttcctgctgtcccaggatccaatttgtgctccaggctgcgctctgccctttccagcatctctttccacctgcttgtagccgctcagcactttggggaaactgaggccagagcggtgagttccagcacagagggaagggcagggcctcaaccttcccagtccaaacaatcatacgccatttaaatctcacaacaaccctaaaagctggcgactattattggcctcattttgtggaaggggaaactgaggcccagagcggcaacgcggccagcgaaccatcggtaagatttgaacctggttgtgtatcattcaacggtctagcgcttggcctcagctgggccaccgcagatgggacatggttctgctgccacctggtggacactcgcggcagcgctgttgggatagagccgcctctcacctgacgtcctgccccgaaaagcccagccagaggagggctgacctgctcccctggcctccctgccccgcatcacgcccatcagttttccgaattttcacagtctaagtgtccaccaggaagggactgggtaactaaccacctgtgctacagttgggctaaagattttagtgcaaaagttaatttgcccacctcacaagaaatactaaaaaaatgtatattttttcgagacagagtctcactctgttgcccaggctggagtacagtggcacaatctcggctcactgcaacctccgactcccaggctcaagcgattctcatgcctcagcctctcaagtagctgggactacaggcacccgccacaatacccagctaatttttgtattttttaatagaagcggggtttcaccatgttggccaggctggtctcgagctcctgacctcaggtgatccacccacctgggcctcgcaaggtgctgggattacaggcgagagccaccgtacccacccaaaataaattctttaggctgaaaacaagggaccccagacatgtattccaatccacgtgaaaatctgaagaacacatataaaggtaatgtatgtaattttaaaagattgcataaggccgggtgctttggctcacgcctgtaatcccaacacttcaggaggctgaggtgggcagatcaattgagcctaggagttcaagaccagcctgggcaacacagagagaccttgtctctacaaaaaatacaaaacttggccgggcacggtggctcacacctgtaatcccagcactttgggaggccgaggcgggtggatcacgaggtcaggagtttaaggaaaaaaatataaaacttagctgggtttcatggcatccgtcctaactactcgggaggtctgaggtgggagaatctcttgaacctgggagttcgaggctgcagtgaacagagatctcgccactgcactccagcctgggcaacagagtgagatcctgtatcaaaaaaataaggctgggcacaatggctcacgcccatgatcccagcactttgggaggccgaggcaggcagatcacgaggtcaggagattgagaccatcgtggctaacatggtgaaaccccatctctactaaaaatacaaaaaattagccgggcatggtggcgggcacctgtagtcccagctactcgagggggctgaggcaggagaatggcatgaacccgggaggcggagattgcagtgaactgagatcacgccactgcactccagcctgggtgacagagtgagactccgtctcaaaaaataataataataaataaataaaaataagatctgccagtgacagtggctcatgcctgttatcccagcatgttcggaggccatgacgggcagaccacttgaggtcaggagttcaagaccagccatagccaacatggcgaaactcttgtctctactaaaaattaaaaaaaaaattagccaggcatggtgccgcacatctgcaatttcagctacttgggaggctgaggcaggagaatcatttgaacctgggaggcagaggttgcaatgagccaagattgcaccactgccctccagcctgggtaatggagtgagaccctgtctcaaaataaataaataaaaataaaatgtagcataaatgcaaatttcttctctctttgcctcttaacatatttaaaaagcaattgtacaaaactatatattggccgggcccggtggctcatgcctgcaatcccagcactttgggaggctgaggtgggcatatcacctgaggttgggagttcgagaccagtctggccaacatggtgaaaccccctctctactaaaaatacaaaacattagccgggtgtggtggtgcacgcctgtaatctcagctactcaggaggctgaagcaggagaattgctcgaacctgggaggtggaggttgcagtgagccgagatcatgccactgcaatctagcctgggtgacagagcgagactctgtctcaaaaaaacaaaaaacaaacaaaaaaacaggctgggtgcggtggctcatgcctgtaatcccagcactttgggaggccgaggcgggtgggtcacctgaggtcaggaatctgagaccagcctggccaacccagtaaaaccctatctctactaaaaatacaaaaaattagccaggcgtggtggtgcacgcctgtagtcccagttactcgggaggctgaggcaggagaatcgcttgaacctgggaggcagaggttgcagtgagctgagatcacgctgctgcactccagcctgggcgacagagctaaactccatctcaaaacaacaacaacaacaacaacaaactatatattaattgtattgttgggtctacaatatagagaaaggtaacatatttgacattaacggcacaaaggaggtgaagggagccaagttgtactggaataagaaaatcattgggccgggcgcggtggcttacgcctgtaatcccaacactttgggaggtggaggcaggcggattacctgaggtcaggagttcgagaccagcctaaccaacatggtaaaaccctgtgtctactaaaaatacaaaaattacctgggcatcgtggcgggcgcctgtaatcccagctactctggaggctgaggcgggagaattgcttgaacccaggaggcagaggttgcagtgagccgagatagcgccactgcactctggcctggggaaaagagtaagactcagtctcaaaaaataaaagaaaaagaaaagaaaagaaaatcacacccagtagtgacttgaatccacaaaaccagattaagagaaccagaaatgcaaaataagaaaatgaaaataaaaaattgcatgcttgctgtcctttattttctttctttctttctttcttttttttctgagtcggagtctcgccctgtctcccaggctggagtgcaatggccagatctcggcttactacaacctccatctcccaggttcaagcgattcttctgccttagcctcccgagtagctgggattacaggcgcccgccaccacgcccggctaatttttgtatttttagtagagacggggtttcgccatgttggccaggctggtctcgaactcctgacctcaagtgatccacccgcctcggcctcccaaagtgctgggatgacaggcgtgagccaccgcgcctggtcttttttttttttttttttttttgagacagagtctcactctgtcgcccaggctggagtacagtggcgcaatctcgggtcactgcaacctctggctcctgggttcaaacgattctcatgcctcagcctcctgcctctttcctcttaattttacttcatagccttgtcatcagggagttgtttgcgggtgtttcttttttcatatctggtccccgtcctcatccccaggagggcttctttctgcccaagcaaactgctaagtccaagcccctcaaagtgggcggctggatcttgatccattctccggctctccgcgcgctctcccccaacccctgctccctcaggttcttatgaactggaggcagacagacagagtttgaatcccagctactacgaaacacaaatcggaccccaaattaacaaaaacagcattccagagcttattcaatattcgtgctgcaacatcgctaggagaaaaatatattatttgtattcccattttacagataccctcaggtatctggtggagacctccgtaacacacctccccggaggatgaggccccgagtgtgaagcatcgggatctcacggtaaacaccgcagccacccgaggtagcttaggttcaatgcttaggcatcctgcaggcggcgcgcgccgccgcccctagttgcagccgggactggcggagtgcctacaactcccgacgtgccgcgcgcgcagacgctccgttgcggtcgtggtggaacaggtggagcttgcctcgttgccttctgggaaacgaagtctcgctgaagagaggcggaactttgagtagcaggtggatccatagccaatgaagacgcgggtcgctttgagtgcggggcagagaagccaatggacgtgcggcattgagagggcgggtcttccggtagtgaaggcctggtgaacggctgcgcgacagaggacacttccttttgcgggtggcggcgaacgcggagagcacgccatgaaggcctcgggcacggtaaggcgggcgcggcgcggcagggggccaagggatggggcacgggccccatcaggggcctgcataagtggcgtgggccgggttggtgccgcgcgcttctgtttgggccccccttggccgcgcgccgccttctcttgttgcacccaacatggcggccatcgtgggagccgcgtggagagagcgatgcgtgacctgggccagctcagggatcgcgggggcccaaggactccgggtcttcttcccgggggaaggaataagtcgcgcagcatagaggccctagccccggcacctcgtcgagccgccaagtttctgttttcctttctgcaacgtggacgtggcggtagagcaatagtgtgttttctttctgccggaatggctgtgagaagcagatgaaaattgctaacagtgagccgaaacggggagcgtgaggcttaacgctgtggtacatactggatagaatcaaacggctctatggcgcagagataggagaacctggactcccatggagtgggtgtattatgtccagatctccagcttcggtttccttgctgtcaaaggggcgggccccattgttcccttcctgaacgtgtgccgaggccggtgggtcaggttcacagtaaaagtaggaactgcgataatttgtgactatttttcattgataactagtgaaaagctggcgagtcagtttcagaggtggtttctttgtgccatatcacagagcctggacttgaccaaagattctcacctctgcatctgtaaaccgggagtcttccctgggccaaacgtttggattgcagttgggaaaacggaggcagccgcagctcgcgtggcaacagtgcagggatcccagggctggggagagacctgaggtcttgtcctagttctgcctggaatgggctgtgagatcccatgctggtcactgggcctcagggtgaaagaagatgttggctggatgttttgaggtgcagagtggctgtttgacggcgactgcaaagcaattcaggactgcagcatgaagaaaggaggctgtgggtctaagccacagctttcctggtctgaaacccttagcccaggcaaaggagaggcaggcaactcaattaatcctccctggagacctccctctcctcagttcattttgtgtataaagttgtggtcgggagtgtgacctacagtcaccaagaatccacatggaggccctagggtggccctgcctcctgcttcccgaatctgtggtcactagatgtaggaaagggagtgaggtggatctccacagttgcctctgggtgctggccttaccctcactcctgtttcctttcagctacgagagtacaaggtagtgggtcgctgcctgcccacccccaaatgccacacgccgcccctctaccgcatgcgaatctttgcgcctaatcatgtcgtcgccaagtcccgcttctggtactttgtatctcagttaaagaagatgaagaagtcttcaggggagattgtctactgtgggcaggtatggagaggccggggctacgtggggtctggagtggatttgcgcctcttgggacatcgtgcatctcaagaattaatcagacatcgaacgggtgcggtagctcaacgcctgtaatcccatcacatcagacatcagagccccgggttgtgtttctgcctgggtcacgggactggagcagagcttatgtgccatttccctgattagaaagccagggacccagggagcgggtgggtggcatggtgggacaccttggttggtgctgtcttccctgggccctgtctgttaagtgaggagaggtgatggctatctggtcagtgggtggtagctaggttggcccagacaggttccaggagacttgagttcaggaactgcatctggggctgggttggtgtccgtggcagaagcctggacttcaggctgttgccatgggaagttcccttacctcacgctccctgaggatgcctgaaggtaggtggggctgggaaactgaggcacaagagtctggccatagagtaggcctggagcctggggtgtgctttagaggcagagggttcagtgaggatggggctagggcacatcggcttgctgctctcacatctccctgtggcctctccttggcaggtgtttgagaagtcccccctgcgggtgaagaacttcgggatctggctgcgctatgactcccggagcggcacccacaacatgtaccgggaataccgggacctgaccaccgcaggcgctgtcacccagtgctgtaagctgcctgtcccgcctccagctttttagaccctccttgactccctcacactgaggcagggcaagtgccagaggttcccagtgcaggagagtctcaggactggtggcggggcacaggaagacaaaaggatgccccaggccccagatggcgcttttctgagagccctgccaggctcggttgtaaatcacatcacatctggaaactccctttttgggtctgcaccttgtttagactgggatccacatcaccactgttttctgggacccactgagaaccgaattgaacccctgcctagtgttgggagctggcaccttttccctggctcacctgccagggtctgtgagacccccacacctccctgattgcacctaaacccaagaatcactgtttcttatagcggtggtttaaacagaggtgcaaacagcaagcggatcttgtcgcctttggggggctgtggccgtgcccctcaaagtgaatttggaggttccacaactctagtggccagtgactgcagggacccaggccttgggctatctcgcttccccaccaccaccttcccgtgagccccgagccctcaggcagttgctgtgaccaacaggatgtgtcaggtcattgggcaggcactcaggaggtttgctgaatgcccagagcccaggcaacaccgtcaccctggccccgctcctttccacagaccgagacatgggtgcccggcaccgcgcccgagcccactccattcagatcatgaaggtggaggagatcgcggccagcaagtgccgccggccggctgtcaagcagttccacgtgagtgccctgggggactcccctggagggaagtgcctgctctgacgcaggagcccagtggggggcggctacaccttggtggccccacaggatggggtgttaagaggcttccaaccccctcaacatgcctcccttcctcacaggactccaagatcaagttcccgctgccccaccgggtcctgcgccgtcagcacaagccacgcttcaccaccaagaggcccaacaccttcttctaggtgcagggccctcgtccgggtgtgccccaaataaactcaggaacgccccggtgctcgccgcatgttttctttgcacactgcagagctcaaaggggtgctatgagaggccggcccagtcagctcctggggtgcagctgagctgccatttctttgtcctgggaggggtcttcagtgcaaacaaacaaaccctcacatcctcctgtcctggagtgggccctccaggcgcccccacccctgagctccctcttgcttggtcagttctcagccctgctggcagccctgggctatgagctgcaggggtactgtctgtcctgggccctaaatctgtcccaactgccttgtgagacacaggcctcccaggctcccctgctgagtctggaccagggagaatctccctagatagtggggttggcgttcactccctggggattctcctaagtctctggttcccaaagttttcagagtagacacaagtgggcacccgaggggcgctctctgctgcttgggggctgtttccctttcactggttgggggcctcttagatgacgccctcatcttgcccaaggaggtcaaggactcaccacaggtactcatctctgggaaactgcctcaggcctggaaaattccaggcatgacactaatcccaccctggctgagtccttctgtcaggtggaggctaagctggcattggagaagtttgagacacagccaagagctcaggctctgggagcctcccatcctttgttgcgtgaccttgggcagccctgttctgggccagcggcccttctggggcttgctgtcttgatctcaacatcgggttccacattgatgtgggaagtgacgctgtgcaggtgctggggtcagcctatggggccctcctttgtcccagagagcccaggaccaggaggaagccaggactaggtagtagttacggctttttgaaacagggtcttgctctgtcgccctggctagagtgcagtggagagatcgtggcttactgtagcctcgacctcctgggctcaagtggtcctcctgcctcagcctcccaagtagctgggactacaggggcaccaccacactcagggcaaggacacagcctttcctctacctgtggaggagctgtgtggtttccaggaaaccaggccttttccagcctcacctgtggggtgttgtaacacccaggaacttggagaggcgcccagaacctgggcagggtcagcacacaagcacccattctgcgtaagacccaggcctgaggacagccctgtagaccacagaaccccacgggtcccgtccccaacaactggctccttcccaccctagggccttcgcacttgcctggaatactacagattcccccaggctggcctcactcgagttttacaaactgcacgtgggttcccgggactgggctatatttgatttctatcccccactagttctgagagggcaggggctgtgtgtgtcacccagtgtatccaggaggggctcaactttccatggtatcctttttgtttcgtgaaagctctttacatatgcggggcaaaagcttgagaagagtcatacattttcccaggatatctttctttttttgagacggagtcgcgcttggttgcccatgctggagtgcagtggcacagtctcagctcactgcaacctctgcctcccaggttcaagggattctcctgcctcagcctccagagtagctagaattacaggtgcctgccaccacgcctggcaaattttttgtatttttagtacagacggggtttcaccatgtgggccgggctagtctggaactcgacctcatgccacctgctttggcctcccaaagtgctgggattacaggtgtgagccaccccgcctagcccaggatatcttttgatgttccttagagtatattggatggggggtgctagctggaaatcttaaaattttgcctgaatttcattcatcttgtggtttctagtacaaactctcctttctccataagggaatcttcatacttaagtgccacccagaaaagaaaatacatttcctaacctccatagctatggccaggtgtggctcatggctgtcatctcagcactttgggaggctgaggtaggaggatcacttgaggccaggagtttgagaccagactggtagacatagtgagaccctgtctttaccaagtaacattagctgggtgttgcggtgcacacctgtagtcccagctacacgggggcctgaggtgtgagaatcacttgagcctggaggttgaggctgcagtgaaccatgatcatgccactgtactccagcctggaaacaagacgagaccaaacaaaacaaaaatacagtactgatgtgccatttctgagaaagaacgcctctggctggtgtggacatgatggccagtgctgcagcagtcattttggactatgaagaagcaacacacaggagcagtgagggagaaggatctccggtacttgaccctgtgcagtgctgcccccgtccctgaggcttgacccttctacccccttgattagaacacggggaggagacatgagtcctgcttaggctgtaatggagctgctctgttagatgtgaccttaccttaccttgagctgggcctgaagcagggcgtggcactgtggactcaggccgtaactgcctggaagtccctgccctctctgagccatttcttcctgtataaagtgagggcggtgatccctccaggctgcagggcaggcgaggtgatattaggtgagttggaggatgagagatcaggagagtggaaggctcacggccccaccaaagcccactgcataccctcatctccacctcagtcccctccctgtgccttggagcccctccagggcttcaaccacgtggcagcagcctgggaaccacttgggagagctctgccccaaccagctgagacatggaggccaatcccattattgaggggccattgacaggatgaatgtgctcccagatcactagcctgcacctattcacctaccttggcacactcagcctctcataaatgtgcccagaagcccctctaccaccgaattcccccaccccctgccaaaccccatccttccattcagtcagattcctccaccatccaaccagctacctgtccatccattcgtccactcaatccacccaccccatccattcatccttccactcatccacctacccatccatccatccacccaaccatccagccatccatccagctatccacccacccacccatccatcaactcacccatccatccatccacccatctatccatccatccatctacccacccacccatccacccacctgcccatcaacccacccacccatctatccatccatccatccattcacccattcaaccacccaccagtcgatacatacatccatttatccatccatccatctatccacccacccatccatccatttacacatcctcccatctgtcatgtcaaatcctctacccaaactccacgcgcccacccccaccccacacacaccatccctttgttgcagcctcaattgtccttgagtccctactttgtgcaggggcctgcgttaattccggtgtgggtgattgaaggaatagacagaccctggttctttctcaggagggagaggaacagtcacaaccccatgcagaggctgggcgtggtggtggtgtgcccatagtcccagctacttgggagtctgaggcaggaggatcacttgagcccagaaggttgaagttgcagtgagccgtaacctctccactgcactccagcctgggcaacagagcgagcccctgtctcagaaaaacaaatagaaaaaataagcaaacaaaaagaactgcccctggctgttgagagaaggtacaagaccaaccagagcaaaagccctgggtctgggcagaaatggatcctttcacgtggctgtgagtggggccaataaggcagaggctggccagcgagaacctggatgtccgctggggtctggagcaggacaggtcctacccgggctcacccagttaacccaaggataagcaagggcaggaatccaggaactcctcccacctcctcaggtgctgaggcgctcctgggtctcgttcctgggcttgtcaaggtgccaggtgtcacctcagtagggccgtgatccctgggggagcgacattcaaagcctcccctccctgacccgccctgcacttctgctcctgagtcagaaccagtggggacaaaggcagtgccaaagcaggacagacgagtagggaccccaagagaccccagccccagttcctgcaaccaagagagactatatgagaatcacagaatctgagactcacagttgagtctcaggacttagaattatggaatctttttttttttttttttttttttgagatggagtttcactcttgctgcccaggttggagtgcaatggcatgatcttagcttactgcaacctctgcctcttgggttcaagcgattctcctgcttcagcctcccgagtagctgggattacacatgcctgccaccatgcctggctagttttttgtgtttttagtagacacggggtttcttcatgttggccagggtgggcttgaactcctgacttcagatgatccacctgcctgggcctccaaaagtgttgggattacaagcgtgagcaccgtgcccagtcgaattgtggaatcttacagacagcagcagcaacaaggaagaatagtttgcatttatttatttttttagagacagggtcttcttctgtcgcccaggctaaagtgcagtggcgcaatcaccgctcactgcagcctcaacctccccagctcaaccaatccttctgcttcagcctcctaagtagctgggaccacaggtgcacaccaccaaactcggctaacttttaaaaatttttggctgggcatggtggctcacacctgtagtcctagcactttgggaggcagaggtgggtggatcatgtgaggtcaggagttcgagaccagcctggccaacatggtgaaaccccttctctactaaaaatacaacaaacaaacaaacaaacaaaattgtagagttggggtctcactatattgttcaggctggtctccaactcctagcctccagccatcttcctggcttggcctcccaaagtgctgagattacaggcatgagccaccgaaactggcctttttgcacttgttgagtgcagagttgaagttcaaggacagattctggctccccatggcgtgggttcaaatcccactgtcactcctagctcacagaaggggaattgatgtccagggccacccagcaggtcgtgctgcagtcacagcagctcacaacttctcaccccaacccctgctgcatctcccagggaaccaaggggcaggggacagcgccccgacactgccaccactctcccattcctgcacattctgctcacattgtctgccgcggccttgggcccttcctaactcacatcctggggtcctgctgcccgcttctgtcattggaatcacagtcaaggaaggtgtgacctgattctccccactctgctgcttttcctctccaggctcacaattccctccgctagggcaggagatggtcctgcacactctgcaggggccttcactccaggcctccttaggaattccaaagtgctttccaaatccacccccctccccccactcggcagccaccccactcccgccacttggatatgacccatttttcagaatctagaaatctcatcagactcctcacctgctccaaactctcctacagttccccagcaccctcagaacaaaatccacaccccttccggaggcccagaagataccccgtgattgtctgtctctgctcaacctgtatccaggctggaattcactggtgtgatcactgctcactgcagccttgacctcccgggctctggcgatcctcccacctcagcctcccaaagtgctgggattataagtgtgagccacagtgcccagctgaaatcagtatttatctgctggtgaggtcagggccatcaccaccctggggtgggtccacctggatcatgctgtgtccccagcacctgccggagggccctgcacacagtatgcactcaatgaaccggcctcagcccaggcctctggccgcagcctggaccccacggtgggaagaagagaagctatgccttcccagaacttccctggagagaaggggtccatttacatgtatttgcacaatttgcatatgtttacattggtcggcagggctttgcaagtaggggatcccgctcggatctcccattgattgattgattgattgattgagacagtctcgctctgtcgccaggctggagtgcagtggcacgatctcggctcactgcaacctccgcctcccgggttcaagcgattctcctgcctcagtctcccgagtagctgggactacaggcgcgtgccatcacgcccggctaatttttgtatttttagtagagacggggtttcaccacgttggcctggatggtctcgatttcctgacctcgtgatccgcccgcgtcggccccccaaagtgctaggattacaggcgtgagccaccgcgcccagccttgatttttatttatttatttgtttatttatttattttttgagacggaatctctctctgtcgcccaggctggagtgaagtggcgcgatctcggctcactgcaacctccacctcccgggctcaagcgattctcccgcctcagcctcccaagtagctgggattacaggcggccgccaccacgcccggctaattcttgtatttttagtagagacggggtttcaccatgttggccagactggtcttgaacggatctcaagagacccgtccgcctcggccccccaaagtgctgggattacaggagtgagacaccgcacccggccggatctccccttttccaacggggtttccaggaggatgcctgaccagggtggaaggagaaagaactaggtgcctaacccactctcctggcgagggcaggaggtacgctccagccggcaacaggtgcccgcgtagccgccgcagtgtcacagccccgggggagggacaggtccaccctgcacagcagagagggagcaagaggactgtccgggggttacgtggggacgcgttgagaaacgctggacccagctggagcggccagggcagagggtaggccagaggaggccaccagggagcagcagaggctggcgagaagcgctcaaaagccctttttttttttttttttttttttttggagacggggtcttgctgtgctgcccaggctggagtgctgtgcagttctcgaccacagctcattgcagcctcgaacttccacgctcaagcgatcctcccacttcagcctcctgagtagctgggattacaggcatgtgccaccacgcctcgctaatatttgtatttttcatacagacaagatctcactatgttgctcagggtagtctcgaattctgggactcaaatgatcctcccacttcagcctcccaaagtgctgggattacaggcataagccatcatgcccggcctctgacgctgtttctttcaacccccaggatttcagattccaccagcttatggagaagggaaccaagtttgagatgcgtgattgcccagaaagttggaggctgagctgagacttgaacccagagaccagaacctccagaggtcaaagtcctcctgggtcccccagagaagggccctgagatgacagctcgttggtcctcatggaagcgtgacccccccagtagactttctcccacacccaaccttggtttcctcatctatatgatagggacaagccagactctacctccctggtggtcatggtctccgcttattcgggttcataaccttaaaggcccctcgcaccacctcagtgagccatttatgcctggcacagggccaactctcagtgcatatctgcaaaggaaccaatgaatgaatgaatgaagtgacaaatgaataaaggaataaatgaatgaggcacttatcatgtaccaggctttcgttaccacgtcccatttattcctctgaggcagggtctattttatccttgttacagatggggaaactaaggcccagggaggagcaaagtcttccccaagtatgtacccactcagaacttgagctctgaatgtctcccacccagcttagcccaagagcggggttcagtgatgcccaccccctaaggctctagagaaagggggtaggcccacatgccagtttgggggtggtaaagccaggtaagttttctttatgggtcccctgaaaccctgaaagtgaaccccagtcctgcatgaaagtgagctccccatagctcaaggtattcaagcacaatacggctttgagtgctgaagcaggctgtgcaggcttggatagtgacatgccctctctgagcctcaatttccccacctgtcaacagcagacagtgacagctgtgatcaggggatcacagtgcatggggatgggtgggtgcatggggatggaggggcatttgggagccctccccgataccaccccctgcagccacccagatagcctgtcctggcctgtctgtcccagtccagggctgaaagggtgcgggtcctgcccgcccctaggtctggaggcggagtcgcggtgacccgggagcccaataaatctgcaacccacaatcacgagctgctcccgtaagccccaaggcgacctccagctgtcagcgctgagcacagcgcccagggagagggacagacagccggctgcatgggacagcggaacccagagtgagaggggaggtggcaggacagacagacagcaggggcggacgcagagacagacagcggggacagggaggccgacacggacatcgacagcccatagattcctaacccagggagccccggcccctctcgccgcttcccaccccagacggagcggggacaggctgccgagcatcctcccacccgccctccccgtcctgcctcctcggcccctgccagcttcccccgcttgagcacgcagggcgtccgaggacgcgctgggcctccgcacccgccctcatggaggccgtggagaccggggaacggcccaccttcggagcctgggactacggggtctttgccctcatgctcctggtgtccactggcatcgggctgtgggtcgggctggctcggggcgggcagcgcagcgctgaggacttcttcaccgggggccggcgcctggcggccctgcccgtgggcctgtcgctgtctgccagcttcatgtcggccgtgcaggtgctgggcgtgccgtcggaggcctatcgctatggcctcaagttcctctggatgtgcctgggccagcttctgaactcggtcctcaccgccctgctcttcatgcccgtcttctaccgcctgggcctcaccagcacctacgaggtaccggacagaggcccgggggtaggacctgccccactggcagtgctgggaccccgtgtgggggaggcgctggggctttgggccgctgtacaggaggacgcggatggcacctcggtgctttaacggaaggggcccctaggcagacacgtggggagggttctaggaagaggccccaggcgcccggcgaggggcaggaaggaggaagagagagcctggcgtcctgctccttcggtggaagcgcgcgcggggcggggcccggctcgaccaggtgtgtcctcacgggtggacacacacctgccccccacctgcccgggcgtgcagacccacgtgtgcgcgctagaggggactgctgacggctccggggttcgaaacctggcttcactgctttcttgtatcttgggcaaggggcgtgcctctctgtttgggtttcccagctgtccaatgggcgaattacaggacctccctccaggggagagggtaaagcgattaaaatcgtgaccggggcccggtgcggtggctcacgcctgtaatcccagcactttgggaggccaaagcatgcagatcacctgaggtcaggagttcaagaccagcctggccaacatggcgaaaccccgtctctactaaaaatacaaaaattagccggatgtggtggtgggcacctgtaatcccagctacttgggaggctaagacaggagaattgcttgaacccgggaggttgcagtgagccgatatcgcgtcactgcactccagcctgggcgacagagcgagactcttgtctcaaaggaaaaaaaaatattgtggcagggcgcagtggctcacgcctgtaatcccagcactttgggaggccgaggtgggtggatcacgaggtcaggagttcaagaccagcctggctaacatggtgaaaccccgtctttactaaaaatacaaaaattagccgggcatggtcgcgcgcgcctgtaatcccagctactcaggaggctgaggcagaagaattgcttgaacctgggaggcggaggttgcagtgagccgagatcgtgccagtgcaccctagcctgggcgacagagcgagactccgtcccccctcccccccaaaaaaatcgtgacaggtatatcctaggcggccaacaccattggcccggggcactgtctacactgtgcgcttgcgggccacgtcggtgtctgctgagcggtggctgctccaggagcccgcgcccgtcaggcgcaagtgggagggcgcgtgcacacgcatggaccagtcctccaggtccacggggtacgcacaggcacgggatggcacctgtgcacgggtgtgtgcgtgcggcggggcccccacgtgcaagaatctggcgggcgcggttggcttccggagggaggggcccacctagagagcagaccagggacccgagaggcctcggctcctgggtaaggactgtccaggtgacctcgagtccctccttgcagtacctggagatgcgcttcagccgcgcagtgcggctctgcgggactttgcagtacattgtagccacggtgagtggcctcggccccgccctccgctcagggccccgagagcgtcagccttcactagcccggcccccaccattcaagaccccgcccagaccccgccccccatgctcccgttctgaccccgcccccatcagtcccctcccacaccacagccggcctgaccccgcctgcactctggaagacccggcctatctgccccgcccatattctgggaccacccttctgcctcctctccccatccccaactcgcccagacgccctccctgctcacccgccccacactctgtctacagatgctgtacaccggcatcgtaatctacgcaccggccctcatcctgaaccaaggtgtgactctgggagattagggaagcatgtctgggaagagaaagggagggagaggagaacccaagactaagtttgcgccccgcccaggggcctaacagggggacctctttttgcatagtgaccgggctggacatctgggcgtcgctcctgtccaccggaattatctgcaccttctacacggctgtggtgagtggccctgggaactcactccatacgggggatcgggcccactgtgtctcttgtggggagactctgggcttgcccctttctcctgaggaagcctctgtcccagctgggacccagtgtcctcatctttatagtgaaaaatgatctgaaaagcttattgctgagaatctagaggtatggtagcttcaggcatggctggatccaggcttccacctcttctggcttccagtccagcaggaagtgagctcctgcttcatcctggggctggctgaggtcccagggagggctacctttggctggctcaggtctgaccttgatggcgatattatcatcgtagtgataataatagtaatggcggccgggcgcggtggctcacgtctgtaatcccagcactttgggaagcagaggcaggcggatcacctaaggtcaggagttcgagaccagcctggccaacatgatgaaaccccgtctctactaagaatacaaaaattacctgggcgcagtggcacgcgcctgtaatcctagcctctcaggaggctgaggcaggagaatcgcttgaacccgggaggtggaggttgcggtgcgtggagattgcgccattgcactccagcctgggcgacagagcaagactccatctcaaaaaaatataataataataataataatagtaatggcagcaatcactcactgacactcgtatatgtcaagtcatattccaaatctttttcacttattaacttgtttaattctactgggcacagtggctcatacctgtaatcccagcactttgagaggccaaggtaggaggatcacttgaggccaggggttcgagaccagcctaggcaacatagtgagacccccccccgcccccatctctacaaaaaaaattttttttaaattagtcgggcatggtggcacctgctgtagctccagctactccggaggctgaggcaggaggatcacttgagcctaagagttccagtctgcagtgagctgtgatcacaccactgcactccagcctgggcaaaagacagaaaccttttctttaaaaataaaataactaacttaattcttacaacaacacagtaagaaggtattattattaatcccactttagagaggaggagactgaggcatagaagggcatcagtcctaggcaccactgaaggccaggtcccccatctaaccgcccctctccctctctctgtcccatgctgcagggcggcatgaaggctgtggtctggactgatgtgttccaggtcgtggtgatgctaagtggcttctgggttgtcctggcacgcggtgtcatgcttgtgggcgggccccgccaggtgctcacgctggcccagaaccactcccggatcaacctcatggagtgagtgaaaatgcagaggatactccagcaggatggggctgggaccagtgcggtggctcatgcctgtaatcccagcactttgggaggccgaggcgggcagatcacttgagctcaggagttcaagaccagcctgggcaacatggtgaaaacccatctctacaaaaatacaaaaattagctgggcgtggtggtgcacctgtggtcccaggtagttgagaggctgaggctggaggattgcttgagcccggtaggtggaggctgcagcaagctgagatcacactactgcactccagcctggatgacagagctagaccctgtctcaaaaaaaaaaaaaaaaagaggctgggtgcagtggttcatgcctgtaatcccagcactttgggaggccaaggcggggggatcacctgaggtcaggaatttgagaccagcatgaccgacatcgagaaaccccatctctactaaaaaatacaaaattaggctgggcgcggtggctcacgcctgtaatcccagcactttgggaggccaaggatggcagatcatgaggtcaagagattgagaccatcctggccaacttgatgaaagtccgtctttactaaaaatacaaaaattagctgggcatgctggcaggcgcctgtaatcccagctactcaggaggctgaggcaggagaattgcttgaacccaggaggcagaggttgcagtgagccgagatggcatcactgcactcccgcctggtgacagagagagactccgtcccccccctaaaaaaaaaaaaaattagcagggcgtggtggcgcatgcctgtaattccagctactcggggaggctgaggcaggagaatcgcttgaacccaggaggcggaggctgcggtgagccgagatcacaccattgcactccagcctgggcaacaagagcgaaactccatctttaaaaaaaaaaaaagaggatggggctgggctccctttgtgccgtgggatggtagaaatcagccaatgcctcctgctccaggaggccctcgctgctctcttctcctcccctcagaccagattgggggctaaagcctctctgaactctcagctgggcaaagaaaggtttttaagtgcgtggatagatgattcagtaaacaaatacgtgaattttcaatctggcaaatgcctatgcatatgtcaaacccactccatttattatttatttatttttaatttaattaatttttttttttttgagatggagtctcgctctgtcacccaggctggagtgcaatggcacgatctcagctcactgcaacctccgcctcctgggttgaagtgattctcctgcctcagcctcccaagtagctgggattagaggcacccgccattattcccagctaatttttgtatttttatagagatggggtttcaccatgttggccaggctggccttgaactgtgacctcaggtgatccatccgccttggcctcccaaagtgctgggattacaggcatgagccactgcgcctggccaacaaaacccactccaaatgtcccctataaggtccagaagcgctgtctggggcccttgggagggtgaagtcagcgtgacatctccacgtggctaacttgccctgtccccacccagctttaaccctgacccgaggagccgctatacattctggacttttgtggtgggtggcacgttggtgtggctctccatgtatggcgtgaaccaggcgcaggtgcagcgctacgtggcttgccgcacagagaagcaggccaagctgtgagtgtttcggggagcaaggtcggggtttctgggacatgctgcccccctccaccagcctgaggctatcccctaagcctgaggctgcctcttcccccagggccctgctcatcaaccaggtcggcctgttcctgatcgtgtccagcgctgcctgctgtggcatcgtcatgtttgtgttctacactgactgcgaccctctcctcctggggcgcatctctgccccagaccaggtgagtcccacccaggctcctggttggctctgcactccctcactagcttggtgggattgaggtcgaagagcattcctagcagagggaatggcctgtgcaaaggccaagaagtaggaaagagctgagaggaggccaggtgcggcggctcatgcctgtatcccagcactttgggaggctgaggcgggtggatcacctgaggtcaggagtttgagaccagtctggctaacatggtgaaaccctgtctctactaaaaatataaaaattagctggacgtggtggcacgcacctgtagtcccggctactcaggaggctgaggcaggagaatctcttgaacccgggaggcggaggttgcgatgaagggagatcgcaccactacactccaccttggatgacagagtgagactctgtctcaaaaaaataaaataaaataaaataaagagttcagaggaggatctgcaaggaatgggaaaggtgagtctgggaggcaatggaccgccctcagtaggtgtgagcagacaagggccacattcagatctagagttccagagagttccaaagatcccctgggagatgctcaggaggagatgaaaccatgacccaggccgggcatgttggctcacgcctgtaatcccagcacttttggaggccgagacaggcagatcacttgaggttagaagttcgaaaccaacctggccaacatggtgaaacccccctccactaaaaatacaaaaattacctaggcctggtgatgcatgcctgtaatcccagctactcgggaggctgaggcaggagaatagcttgaacccgggaggtggaggttgcagtgagcagagatcgcgccattgcactccagcctgggtgacagagagagactccatctcaaaaaaaaaaaaaacaaaaaaaaaaaaccaaaacaaggctgggcgcggtggcttacgcctataatctcagcacttttggaggctgaggcaggggtatcacctgaggtcatgagttgaagaccatcctgaccaacatggaaaaaccccgtccctactgaaaaatacaaaattagccgggtgtggtggtgcatgcctgtaatcccagctactcgggaggctgaggcaggagaatagcttaaacctgggaggcggaggttgcggtgagctgagatggcgccattgcactccagcctgggcaacaagagagaaactccgtctcaaacaaaaataaaaacaaaacaaaacaaacccacaaaaacaaaaacaaaaactgtaatccagcgggaactaatcatgttggtgataataataatgacagctctggtctcccatgtcccaagcgtccactctgtgcctcatgctgttcccttcaccagcagttagttctccatctaatctttcttctgagaaaggcagggcagtcacggctccaactttacagatgaggaaattgaggctcggggggaagtcactgcctgaggtcaatgggcaagtcggggggcggtgccaggacccatgcctaggtcacaccccaagtagagttctgaccatggggttcagagttagcagagggtacgggggaccaccccatctgcagtcctccctggaggtcagatccgggactgctggactgtgtaacttcagggagggactgtactctctgcctcacagtcttcatcaataaaatgaggatgacacgggtccctgcttcacagggatcccagggctcagaacacagtggggctcagggacaattctcaggttcatgcagttgatcaacaaatgcacattatagcctgaggaacatagggagaccccatctttacacaatttttttttttttgagccagagtctcactctgttgcccaggctggagtgcagtggcgcaacctcagctcactgcaacctctggctcccaggatcaagccattctcttgcctcagcccccgagtagctgggatgacaggcatgcgccaccatgcccagctaatttttttgtattttttgtaggggtggggttttgccatgttggccaggctggtctcaaactcctgacctcaggtgatccacctgcctcagcctctgaatgtgctgggattacaggcatgagccactgtgcccggcctttctttcttttctttctttttttttttttttgagacagagtttggctctgttgtgcaggctggagtgcaacggcgcgatctccgctcgctgcaacctctacctctcagattcaggcaattcctctgcctcagcctcccaagtagctgggactccaggtgccaaccaccacacccagctaatttatgtattttgggtagagatgaggtttcaccatgttggccaggctggtcttgaacttctgagctcaagtgatccacccgcctcggcctcccgaagtgttgggattacacgcgtgagtcaccctgcccggccagacccctatctttacacaaaaatttaaaaaaattagccaggcatggtggcgcacacctgtggtctcagctactgggggactgaagcaggaagatcgcttgagcccaggagttctaggctgcagtgagccacattcatgggactgcactcccgcctgggcaacagagcaagatcttttctcaaaacaaaacaaaacaaaacaaaaccacagacaaaaactaaatgcatattaaatgccgactctgagccctgtccgtcttgggtgctggggacgtgcagcatcaggacagatagatgccccggtcctcggggtgcagctgtctgggaggctgacccccagttctccccagtacatgcctctgctggtgctggacatcttcgaagatctgcctggagtccccgggcttttcctggcctgtgcttacagtggcaccctcaggtgagcacccctgcttgttcatggagcattatttcagcccctgggagcctccttatcctggcctgccatccctctggggcatggaatgttctggacctgtccatcagtcccagttcctgcttgatccctagaagacagctcaggtaggcgctggcagagagcatgccctgggcacagggaccccaactgcaagggtttaccttcttatcacctgtcagggccacgcctgactctcctctcttcttcttccttctttccttccttcctccccagacaaatatttgttgaacatctactatgtggcaggtactgtttttttttgttttttttccggatggagtcttgctctgtcacccaggctggagtgcagtggtgccatctcggctcactgcaacctccacctcctgggttcaagcaattctcctgcctcagcctcccaagtagctgggattacaggtccacgccaccacagccggctaatttttgtatttttagtagagacggggtttcgccatgttggccaggctggtcttgaactcctgacctcaggtgatctgcatgctttggcctcgcaaagtgctgagattgcaggcatgagccaacgtgctcagcccaggtactgttgttctaaaccctggggcacagccatgaccaagcagtcccctgcttctgccttccaaggccacacactcaggtggtttccactcttccgggacttctggtcacatgccctcactgtcccttttgcaaatctcccacatgtgactgcagtccctctggaaccagaacccacctgtctgtcccacctgcccttggtcacaggtgtccttgctcctgtagggatgtctcaggtcttcggggaggggaggggcaaatatctccttcacctttgcaggactgggttacccccaccgttgccctcaggctgggtgaggtctggcaggccagatggtgtggacggtctctccatatggcctgaggaccccccgctgccttcctcacacagcacagcatccaccagcatcaatgctatggctgcagtcactgtagaagacctcatcaaacctcggctgcggagcctggcacccaggaaactcgtgattatctccaaggggctctgtgagtttcagggagacctgggtgggaggccagggcagtccctccccgttgaccgtgccatcctcatccactacagcactcatctacggatcggcctgtctcaccgtggcagccctgtcctcactgctcggaggaggtgtccttcaggtgagaccccacctgccccctgccctggtctcctgagaggtgggggcacctttccctctttcccattaaactgaggctcagagaggtcacatgtgtcagtggcagaactcacttctatgttttttttttttttgagatggggtctcactgtgttgtcccaggttggtgagcagaggcccgatcatagctcactgcaacctccagctcctgggttcaagccatccttccacctcaatctcccaagtagctggagttacaggtgtgtgccaccatgcctggctaatttttttcttttttcttttttttttttttttgaggtggagtgtcactctgttgcccaggctggagtgcagtggcatgatctcagctcgctgcaacctccaccccctgggttcaaggaattctgcctcagcctccagagtagctgggattacaggtgcatgccaccatgcccgtctaatatttttgtatttttttttcttgagacggagtctcgctctgttgcccaggctggagtgcagtggcaccatcttggctcactgcaagctcagcctcctgggttcacgccattctcctgcctcagcctcccgagtagctgggactacaagcgcccgccaccacgcctgactaattttttgtatttttagtagagatggggtttcaccgtgttagccaggatggtctcgatctcctgacctcgtgatccgccctcctcggcctcccaaagtgctgggattacaggcgtgagccaccgcgcccagcttatatttttgtatttttattagagatgggacttcaccatgttggccagtctggtctcgaactcctgacctcaagtgatccacccgcctctgcctcccaaagtgttgggattacaggtgtgagccaccacgcctggcctggctaattttaaaacttgtttttagagacagggtctcgcttcgtgcctaggcttgtcttgaactcctggcctcaagcaaccacccgcctcagccttccaagtcgctgagattaagaactaagttctatttgatgccagaggccatcaggggacttttttgcagctggctggcttggggtgggggaattgggaagggggaggtggcgacagaaagggcctccctatggaggttgcagtgagccaagatcgcgccactgcactccaacctggacagcaaagtgagactctgtctaaaaaaaaaaaagaagaagaaagggtctccctggcttgagggtgggactgccacccccaagagataatcagtgtctttgcctccaacccaagggagataggcaggaacaaggggggggggtcctctcccctttagggaaactgagacacagaggagtccttgagacccacattggagttcctgaggtctcgctttcccagcgggtaaactgaggcccagagcggtgggagggctccgccctcagccccacttccacctactctcccagggctccttcaccgtcatgggagtcatcagcggccccctgctgggagccttcatcttgggaatgttcctgccggcctgcaacacaccggtgagtgggggcggggcaaggggcggggaggggcggggccggacaggcccctccccttccctgacgccggctctgcccccagggcgtcctcgcgggactaggcgcgggcttggcgctgtcgctgtgggtggccttgggcgccacgctgtacccacccagcgagcagaccatgagggtcctgccatcgtcggctgcccgctgcgtggctctctcagtcaacgcctctggcctcctggacccggctctcctccctgctaacgactccagcagggcccccaggtgagcagacttgagggtaggggggtacccgagccctggatggtgtgatcttgaagggaaacttacttgccctgcactctgtgtaagaagcctgattagtaaaatgcattcctgggggagggaacggtaggtgcaaaggccctgaggccacaatcgggttagtcccagtccaactgcactgaggttagggtgcatttaatgggaggagagatgggtgggagatatggtgcagccagaggaagctagtactttttttgttttgtttttctgagacagagcctcgctctgtggtccaggctggaatgcaggggtgcaatctcagcttactgcagcttcaacctctcaggctcaagcaatcctcccagcttgagggaggcccagaatttggtttggttctattttttattgagataaattagccatttaaaagtggcatttaggccaggcaggcacagtggctcacacctgtaatcccagcactttgggaggctgaggcaggtggatcacctgaggtcaggagttcaagaccagcttgatcaacatggggaaacccccgtctctactaaaaatacaaaacttagccaagcgtggtggcaggtgcctgtaatcccagctactcgggaggctgagacaggagaatcgcttgaacccaggaggtggaggttgcagtgagctgagatcgcaccactgtattccagcctgggcaacaaaaatgaaactccaactcaaataaataaattaaagtggcatttagtatatttgtgcaaccatcaccactatctaagtcaagaacgtttcctcttttttttttctaattttgtatttttagtacagatggggtttcaccatgttggccaggctgatcttgaactcctgacctcaggtgatccgcccacctcagcctcccaaaatgctgggattacaggtgtgagccactgtgcctggccccaaaaacattttctatttttttttttttttggagcagggtcttgctctgttgcccaggctggagtccagtggcacgatcatagctcactgctgcctcaacctcctgggctcaaggaatcttcctacctcagcccccctagttgctgggaccacaggtgcacaccatcatgtcctgcttgtttttatttttattttttgtagagacagggtctggctatgttgcccaggctggtctggaattcctgggctcaagcgatctgcccacctcagccttgcaaagtgccaggatgacaggtgtgggcacccagccaaccaagaacattttctgttttgtttatttatttatttatttattttggttttttgggtgggtttttttgctttttgtttatttgattttttggagacagggtctcactctaacacccaggctggagtgcaatggcacaatcacagctcactgcaccattgacctccagactccgatgatcctcctgcctcagcctcccaagtagctgggactataggcatgtatcaccatgctgggctaaattttttgtattttttatagagacgagtttttgccatgttgcccaggctggtctcaaagtattgggctcaagtgatctgcctgcctctgactcccaaagtgctgggattacaggtgtgaggcactgttcctggtcataagaacatttttatcaccccagaaagaagccctgtccccatcagcagtcacttcccacttccccctctccccagctcctggcaagcacgaatccactttctgtttctatgaatttgcctgttctgggcatttcatgtaaatggaatcataaaatatgtgatcttttgtgtcttagcataatacatatatattttttgagacggggtttcactttgtcgcccaggctggagtgcagtggcgtgatcccagctcactgcaacctctgcctcccaggttcaagcaattctcctgtctcggcctcctgagtagctggggtcacaggcatatgccaccacgcttgggtaatttttgtatttttagtaaagatggggtttcaccatattgatcaggctggtcttgaactcctgacctcaggagatccacacatcttggcctttcaaagtactgggattacagcagagtacagtggagccactgcactccagtctgggtaacagagtgagactccaccaaaaacaaacaaaaccaaaaacatttgtgaacaagttttggtatggacatatgttttaatttctctaggtatatacctatgagtggaattgctggatcatatggtaattctttaactttttttttttttttttagatggagtcttgctctgtcgcccaggctggagtgcagtggtgtgatctccactcactgcaacctccgcctcctgggttcaagcgattctcccgcttcagcctcccgagtagctgggactacaggcatatgccaccacgcctggctaatttttatatttttagtagagaaggggtttcaccatgttggtcagggtggtctcaaacccctgacctcagatgatccgcctgccttggcctcccagggtgttaggattacaggcctgagccaccacgcccggcctatgtttaactttttgaggaactaccagactgttttccacagcggccacatcattttacattccgaccagcaacatatgaggattctaacttctccacgtcctcgccaatactcattattctccatcctagtgggtgtgaagtgatacctcactgtggttttgatttgcatttccctgatgaataatgatgttgagcatctttcttttcattggccatttgtgcatcttctttggagaaatgtctattcaaaccctttgcccatccagcctgggtaacatagaaagaccctatctctataaaaataaaaatgaaaaaattagctgggcatggtggtgcacacttgtagtcccagctccttgggaggctgaggcaaagaggatcgcttgagcctggggggccaaggctgcagtgaagcatgatcccaccactgcactccatcctaggcaacagagcaagaccctgcctcaaattaaaaaacaaacaaacaaaaaaacaccctttgcccatttttaaattgggtgatttgtctttttattgttgagttataatttacatatttttatatctttatgtattctgggtacaagcccctgatcagatgtataatttgcatgtgatattttctcccattctgtaggttgtcttcattctctcgatagaatcctttgatgcacagaagtttttaattcttttttttggtgggcggatggagtctaactctgtcacccaggctggagtgcagtggtgcgatttcagctcactgcaacctccacctcccaggttcaagggattctcccacctcagcctcgtgagtagctgtgactacaggtgcacaccactatgccaggctaatttttatatttttagtagagatggggtttcaccatgttagccagcctggtttcaactcctgacctcagcctgcctcagcctcccaaagtgctaggattacaggcatgagccaacatgcctggccagaagtttttaattttttttttttttttttgagatggagtctcgctctgttgcccaggctggagtgcaatggtgtgatctcggctcactgcaagctccacctcccgggttcatgccattctcctgcctcagcctctcgagtagctgggactactggcacccgccatcaggcctggctaattttttattatttttttatttttagtagagacagggtttcaccatgttagccaggatggtctcgatctcctgacctcgtgatccacccgccttggcctcccaaagtgctaggattacaggtgtgagccaccacgcccagccagtttttaatttttgatgaagtccaattgatttatttttttctttggtggcttttgcttttggcgtcatatctaagaaacaattgcagtcacgaagattcccacctatgttttcttctgagagtttaatttggtttgattttgagggtgacagggagccacagagggtgacgggcagcagcaggtgatctgagttacattttagtaatgtgccctttggctgtgtgtggaggacgtctagggtggggatgggatacctggagggaaggaacattggctactgcacagatctgggcagacagtaatggaggtctgtgctaggccatggcagttgggggaaggaagcagggggtgaggttggaacagcttttgagtgcaggcaggggataaaagaggaggttcaagtctgtctctcccaacctgcagctcaggaatggacgccagccgacccgccttagctgacagcttctatgccatctcctatctctattacggtgccctgggcacgctgaccactgtgctgtgcggagccctcatcagctgcctgacaggtaggtaaacagagcatgtggcctcagaggtcatcccattcatctctctgcctcaaggctccacccagcagggaggggagaaaggacgctcccattggccaaactgccactgtgtgctgtacacatttgtaccttattattattattattattattattattatcatcatcatcatcatcatcatcatcatttttgagatagagtctcactctgtcacccaggctggagtgcagtggtgtgatctcagttcattgcaacctccacctcccagattcaagcgattctcatgtcacagcctcccgagtagctgggattacaagtgtgtgccgccatgcttggctaattttgcatttttagtagagacggagtttcgccatgtgtctcgaactcctgggctcaagtgatccgcccacctcggcctcgcaaagttctgggattataggtgtgagccactgcacctgggctgtacctatttttttaaaaggaaaaaaaaagtttgtgaggaaaaaagaagtgtgtgtgtatatatacacatacatacacacttttatgtgtatatatacataaaagaaattatgaatatatataaaaattatgactatatatatacataaaagaaagtgtatatatatatagtttcttttaaagggacggggtcgactgggcgtagtggctcatgcctgttatcccagcactttgggaggccgaggcgggtggatcacctgaggtcaggagttcaagaccagcccggccaacatggtgaaaccccgtctctactaaaaatacaaaaaaattagctgggcatggtggcaggcgcctgtaatgccagctacttgggaggctgaggtaagggaatcgcttgatcctgggagatggaggttgcagtgagccaagattgcgtcactgcactccagcctgggcaagagagtgagactccatctaaaagaaagaaagaaagaaggaaggaaggaaggaaggaaggaaggaaagagaaagagagagagagagaaggagagaaagagagagagaaagaaaagagacaggtctcactgttacccagactggagtgcagtggcacaatcatggctcactgcaaccttgaactcctgagctgaaagcaatcctcccacctcatcctcccgagtagctgagactacaggtgcgcgccaacgtgcccggctcacatttacaccctttaaagctatgttgctttcttgacaaccctgcacctctcagagcttgccctattttgcagaggcagaaacggaggcattgcctgcaactcctctccccaacaagattaagtcctcagtagaggatatgggttggggcgggcggcgctatccctggtgctgaaatatcttctaaagctgccggtgactccgcacttgttagggaattctaaattccacggaaaagtagaaggagacaaagaggggaaagtcagtagtgataacagtacctgctcacacttcttgagtctcagacttcacagtcatcaggcctttatcgagtcctcctctgtgctggacgctattttaggcactggggatgcagcagtgaatggaaccgtgtgctggaccctcccagccatccattaatgtctttgttttgttttgttttgtttttttgagatggagtttcactctggtcgcccaggctggagtgcaatggtgcgatgttggctcactgcaacctctgactcccgggttcaagcaattctcttacctcagcctcccgagtagctgggattacaagcgcccacccccacgcctggctaatttttgtatttttagtagaaatggggtttcgccatgttggccagactagtctcgaactcctgacgtcaagtgatcccctgccttggtcttccaaagtgctgggactacaggcgtgagccaccgtgcccaacctccaatgatgtttttgttttgttttgttttgttttgttttagaaacagggtctcactctgtcaccaagctggagtgcagtggcacaatgacggctcactgcagcctcgacctcttgggctcaagcaatcctcctgcctcagcctcccaagtagctgagactagaggcacacaccaccatgcctggctaattttttaatattttgtagagatgggttcttgctatgttgcctaggctggtctccaactactgggcaactctaagcaatcctattgccttagactcccaaagtgcaattatgagccaccatacctggcctcactgatgttttattacaacttcactgtgtagatgaggaaactgaggctcagaggcttgccagggtcccttagtgggactggagcctgttagacttcatagaccagggatctcctttctccttcccaggacctggtctccaacccccatgaccccttcactgaatgcctggatttctccatttctccccgcctctcaggccccaccaagcgcagcaccctggccccgggattgttgtggtgggacctcgcacggcagacagcatcagtggcccccaaggaagaagtggccatcctggatgacaacttggtcaaggtcagtcttaggctgggttcccagatctagaggcagccaagtgactttaggacgtgaccacagctcaggggagggacatggtatatcagcacctttctccatcgctcattatctccagtcaaaagactctattgggagctgattcatcctcaacagtttttatctcccttcacaaggactgaacagagtttaatactattcctttttgtttgtttgttttttgagacagagtctcgctctgttgcccaggctggagtgcagtggtgcaatctcggctcactgcaacctccacatcccgagttcaagcgattctcctgcctcagcctcctgagtagttgctactacaggcgcatgccaccgcacccagctaatttttatgtttttagtagagatggggtttcaccatgttgcccaggctggtctcgaactcctgacctcaaatgatccacccaccttagacccccaaagtgctgggatgacaggcatgagccaccgagcccagcctcatcttcaagtttttgttatctcccttcataaggactgaacaaagttgaatactattcctttttgtcgttatctgtttttacagtgacttccaatctttggcaggtgaaactggtgtgctgttagggtattgatgtaaagtctcttcttaaaataaaattacttaattcaaaagtgagtcaacttggggaaaaaatcttacataagaaacacaacagatggtaaaccgattttggctaaaaccgcgtggttgctttgtgaattcccagagtttggaaaatgctgtccctgggggacctgatcccatgcctacccctgttttggaatccctgttccattctctcatttattgagcacctgctgtgtacccagtcctgctctgggctatggtctaagacccccaccccaccctcatctagcaggggcaggtgaaaactaaaaagagaaacatgtagggtctgtctcagtatgtgataagcattcaaaagataatacaaccagatgctgtcaggccgggcacggtagctcacgcctgtaatcccagcactttgggaggttgaggtggatcgcttgaggccaggagttcaagaccagcctgtcgaacatggcaaaaccctgtctctactaaaaatacaaaaattagccgggcatggtggcgtgtgcctgtaatcccagctactcagtggaatgaggcagaagaattgaacaattgaacccgggaggtagaggttgtagtgagctgagatcgcgccactgcattccagcctgggtgacagagcaagacttcgtcaaaaagataggaaagcaggaagggagggagggagggaaaagaaggaaggaaaggaaagagccaggcgtgatggctcacccctgtaatcccagcactttgggagacttaggcaggtgcatcacctgaggtcaggagttcgagaccaccctggccaacatggtgaaaccccatctctactaaaaatacaaaaaattagccgggtgtggtggtgcatgcctataattccagctattcggaaggctgaggcaggagaatcgattgaactcaggaggtggaggttgcagagagcagagattgtgccattgcactccagcctgggcaacaacagccagacactgtcagaaagaaagaaaagacagagagagagagagagagagagagagagagagagagagagagagagcaagctaaaaagaaaaacgtgtagggtctcagcatgataaatattcaaaggataataaaaccggatgctgtgatggggagcaactttagccagggaagtcaggggtggcctcttgggagaggtgacattgattgaccctgagttaggagaagaggaaccagccacagacaggaacagctttgactgagaaggggattgggaggggaggggtttgcctgaaggtgtttaaagctccctccagctgccctagagaagtgtttatcttttctttctttcctcttttcttttcctttctcttcttttcttttttttctttctctctctttttttgttctttattattttatttttcttttttgttgtctttgttttatttgtgtgttttttttcttttttgtcttttttttttttcctttttttgagatagggactcactctattgcccaggctggagtgtagtggcatgaccatggctcactgcagccccaacctccatggtccgagaaattctcccatctttcaacctcctgagtagctgggattataggcatgcaccaccgagtctggttaatttttttatttttggtagagatggggttttgccatattggccaggctggtcttaaactcctgggctcaagtgatctgcccaccttggcctcccaaagtgctaggattacaggggtgagccaccgtgcccggccagaaatatttattttcttgaaggtgaacaggcagagaagcagagaaaggagggaggaactatagcaggcatctgagaaagcgttgatggcctgggctgtaggtgacatgtgagtggggaagagaagcgcatggaaattttggaggcagagcgggcaggactggcccgtgcactgagcaaggggatagtatgcaattctgtgcacgccccgtcccgccaggtcatcagtagcccatctgggagatgagctgacacggaacagggtggggacagggtctctgatggggtctctttttcccacttttccccagggtcctgaagaactccccactggaaacaagaagccccctggcttcctgcccaccaatgaggatcgtctgtttttcttggggcagaaggagctggagggggctggctcttggaccccctgtgttggacatgatggtggtcgagaccagcaggagacaaacctctgaggacagggccagccgcgggactgacaccctgggatggaacctcaggatgggccaaacccagacaacgggcccatggccttgggctctgattggctggattgccttgtatgcaaatgagttcaggactacaataccctaccctatggggaggccctgcctccgggaggtcattttttaaatccagccccttgcttcaaccgtccccagtattagacgctgcagccctgacggctccccccaaataaggctgggtttttctctctctcttttttttttttttttttttttgagacagggtcatgctctgtcacccaggctggagtgcagtggtgtgatctcggctcactgcaacctctgcctcccaggctcaagtgattctcctgcctcagcctcttgagtagctgggattgtaggtgcccaccaccatgcccagccaactttttgtatttttagtagagacagggtttcaccatgttggtcaggctggtctcgaactcctgacctcaagtgatccacctgcctcggcctcccaaagtgctgggttacaggcgtaagctaccatgcccagcctaccgtttttctcaatctataatagaaagccaccacgcccaggtaatttttgtaattttgtatttttgtagagacggggttttgccatgttggccaggctggtctcaaactcctgatctcaggtgatcctcctgccttggcctcccaaagggctgggattacaggggtgagccaccgcgccccacctctttcttattttcttcctgggattggggaggggatgattcagaccccacatggcctccaaccttggcccacacacctgccatggctcccatcatcctgagcatgctagcgtcccctcctcacctgacaatggaggctctcgaattgggttgtgtccccccaaaatttatgtctacccagaacctcagaacatgagcttacttggaaatagggtctttgcaggtgtaactggttaaattaaaagaggtattactggaggaggatggatgaatccagtgactggttcctcatatgaagtagagaagagatgcagagaaacacatggggaagatgccacgtgaagacagaggcagtggttggatcaatgcatctacgagtcggagaacccaaggattgccagcaacaaccagaaatcaggaggggggcatgagatgcattatttcttagagcctttagagggaacatggccctactgacaccttgatgtcagacttctggctgctagaactgtcagagaataaatttctgttgtttgatgccaccaggcctatagtggtttgtgacagcagccacaggagctcatacacctttttttttttttttttttttttttttttttttaaggcagagtctcgctctgtcgcccagactggagtgcagtggtgcgatcttggctcactgaaacctctgcctcccagattctccttcctcagcctctggaggagctgggattacaggcatgtgccaccattcccggctgacttttgtatttttagtagagacggggtttcaccatgtcggtcaggctgatctcgaactcctgacctcaagtgatctgcctgcctcagcttcccaaagtgctgggattataggcgtgagccactgcgcccggcctcatacacaccttctgatcccgcttctctccaccccttggagacctggtcctctgtgcccgctgttgggattggacacctttagatttggacttaaaactggccattacaactttaaaatcgatgactggacgggtgtggcgtctcatgcctgtaatcccagcacttcgggaggctgaggcgggcagatcactcgaggtcaagagttcaagaccagactggccaacatggtgaaaccccatctctactaaaaatacaaaaattagccgggtgtggtggcgggcgcctgtagtcccaggtactcgggaggctgaggcaggagaatcgcttgaacctgggaggcagaggttgcagtgagatcacgccactgcattccagcctgagtgacagagcaagactatgtctcaaaaaaatatatatatatgtatatgtgtgtgtgtgtgtgtgtgtgtgtgtatatatatatataaaatcaaatcaatgactgagcaacgtggtaagcagattttccacctctgtgtagtcctcactcaaaacagagcccaaatctgagatgggaggaggtgcccggggtagggatgggctaatgttcccccaagtgagcagaagaagcttatctggctgcagtatagagatccttccacggcgttattcattccgtttactgcggagtagtattccattgtgcaaaaggaccatagtttgttatctatacaccagttgatgtatgggttgtttgccacttttggctatgagaaataaagttgctatgaacattcatgtacgagtctttgtatggaggctgggcacagtgtctcacgcctgtaattccaacactttgggagaccaaggcaggaggattgctcaagaccaggagtttgagaacagcctgggcaatataacgagaccccatctctatagaaaaatttctttttttttttttttttttttgttttttttgagacggagtcccactctgtcccccaggctggagtgcagcggtgcgatctcggctcactgcaagctccgcctcccgggttcacgccattctcctgcctcagcctcccgagtagctgggactacaggcgccggttgccaccaagcccggctaattttttttgcatttttagtagagacgggatttcaccatgttagccaggatggtcttgatctcctgacctcgtgatccgcgtgcctcagcctcccaaagtgccgggattacaggcgtgagccaccgcgcctggccagtcatctctacttttgtaagcagacagggagggcctccaggtctacaggaatttttttttttttttttttttttttttgagatggagtcttgctctgttgcccaggctggagtgcaatggcgtgatctaggctcactgcaacctctgcctcctgggttcaagtgattctcctgcctcagcctcctgagtagctgggactacaggcatgtgcccactgcgcccagctaattttgtatttttagtagagacaaggtttcaccatgttggccaggctggtctccaactcctgacctccagtcatctgcccaccttggcctcccaaagtgctgggattacagtgagccactgcgtctggccagggattcaggaattctttttttaatggttttttctttctttctttcttttttgaggcggagtcttgctctgtcacccaggctggagtgcagtggcatgatctcagctcactgcagcctccgcctcccagactcaagtgattttcctgcctcagcctccctagtagctgggattacaggcatgcaccaccacagccagctagtttttgtatttttagtagagacagggttttgccgtgttggctaggctggtctcgaactgctgacctcaattgatccaccagcctcggcctcccaaagtgctgggattacaggcgtgagccactgcactcagcctggactacagaaatttaaccagcttgagcatatgagcctgttttacagccccctgccccatagcttgtttttttgtagaaaaaaaaacaagtagaaccccatgtagaatgtggtcacctggttggctggaaccagtttatgacagacctcagcaacttatagatggactggtgaactctaatttttaccgtgctaaagtttccaccctaggccaggagcggtggctcacacctgaaatcccagcgctttgggaggcagaggagggaggatcacctgaggtcaggagctcaagaccaacatggccaatatggggaaaccccatctgtactaaagatacaaaaattagccgggtgtggtgacacatgtctataattccagctactcgggaggctgaggcaggagaatcacttgaacccgggagccagaggttgcagtgagccaagatcgcgccactgcactccagcctgggcaacagagtgagactctgtctcaatcaatcaatcaatcaatcaatcaataaagtttccacgctgggaggaactacagctcaatgccttcacaatgcgacctacgtgctggcgtgacggctcattgtatctgcgccactgcgacactttctatgcgtgcaataatgtaccctctcccctctccattgccccagaaaaccctcctgtcactttccctcttggggacactgctttggaaaaaaagcaaagcccactcctgattctttgcttacttgggacaagtaataaaacccctattgatcaaaacctgcgttcttttggagagttgtttgttactaggcaaatgaaccccctttttcttgggtaacattttcatttttcttggggtatctagaagtaaaatggctggatctgacagtagatatatgtttgactttttaagaaactgcaagccgggcacagtgacccatgcttataatcccagcacttagggaggctgaggcgggaggatcgcttgagcctaggagttcgaggccggcctgggcaacatggagaaaccctgtctctagaaaaaaaaaaaaatagctgggcatggtggcatgcacctgtagtcccagctacttggaaggctgaggtggggggatccctcgagccccagagatcaaggctgcagtgagccatgactgtacccctgcactccaacctgggcgacagagcaagaccctgtctcaaaaaaaaaaaaaaaaaaaggctggagtgcagtggtgcaatcacagctcactgcagcctccacctcctgggttcaagcgattctcatacctcagcctcccgagtagctgggattacaggcgctcactaccatgcctggctaatttttgtatttttagtagagatagggtttcgccatgttgatcaggctggtctggaactcctgacctcaagtgatctgcctgcctcagcctcccaaagtgctgggattacagtcatgagccactgcacctggctgcaaaaaaaggggaaatttagtttcattttgggttaattttcgtatatgaggtaagggtctgatatggtttaactctgtgttcccacccaaatctcatcttgaattgtactcccataattcccacgtgttgtgggagggagctggtgggagataattgaatcatgggggcggttccccccatactgttcttgcggtagttgtggtagtgaataagtttcacgagatctgatgttttttgtttgtttgtttgttttgctttgtttttttttttgagacagagtcttgctcttttgcccaggctggaatgcagtgacatgatctcagctcactgcaacttccacctctcgggttcaagcaattctcctgcctcagcctcccaagtagctgggactacaggtgcctgccaccaagcccgtctaattttttgtattttagtagagagtagagggtttcactgtgttgcccaggctggtctcgaactcctgagctcaggcaatctgcctgcctcagcctcccaaagtgctaggattacaggcatgagccaccgtgtctggccgagatctgatggttttatcaggggtttccacttttgcatcttcctcattttctcttgccactgccatgtaagaagtgcttttcacctcctgccatgattctgaggcctccccagccgtgtagaactgcaagtccaattaaacctctttttctctgtctcgggtatgtctttattagcagtgtgaaaacagactaatacagtaaattggtactgggagtggggcattgctgaaaagatacctgaaaatgtggaagtgactttggaactgggtaacaggcagaggttggaacagtttggaaggctcagaaaaagacacgaaaatgtgggaaagtttggaacttcctagagacttgttgaatagctttgcccaaaatgctgatagtgatatggacaataaggtccaggctgaggtggtctcagatggagatgaggaacatgttgggaactggagcaaaggtgactgttgttatgttttaacaaagagactggcagcattttgcccctgacctagagatatgtggaatgttgaactttgagagagatgatttagggtatctggtggaagaagtttctaagcagcaaagcattcaagaggtgacttatgtgctgttaaaagcattcagttttaaaagggaaacagagcataaaagtttgaaaaatttgcagcctgacaatgtgatagaaaaaaaattgcattttctaaggagaaattcaagccaactgcagaaatttgcataagtaatgaggaatcgaatgttaatccccaagacaatggggaaaatgtctccagggcatgtcaggggtcctcacagcagcccctcccatcacagggctggaggcctaggaggaaaaagtggttttgtgggctgggcccagggtccccaagctatgtacagtctagggacttggtgtcctgtgtcccagccgctccagccatggctgaaaaaggcgaatgcagagctcaggccatggcttcagatggtgcaagccccaagccttggcagctcccacatggcattgagcctgtgggtgcacagaagtcaagaatcaaggtttgggaacctccacctagatttcagaagatgtatggagatgcctggatgcccaggcagaagtttgctgtaagggtggggctctcatggaaaacctctcctagggcagtgcagaagggaaatatggggtcagagcccctacatagagtctctactggggtactgcctagtggagctgtgagaagagggccaccatcctccagacaccagaatggtagatccaccgacagcttgcacaatatgcctggaaaagccacagacactcaacaccagcccgtgaaagcagctgggaggaacgccgtaccctgcaaagtcacagggacggagctgcccaagatcatgggaacccacctcttgcatcagcatgacctggatgtgagacatgaagtcaaaggagataatgttggagctttaggatttgaatgccccgccggatttcagacttgcatggggtctgtagccctttgttttggccaatttctcccattttgaatggctgtatttacccaatgtctgtacttccatttccatctaggaaataactaacttgcttttgattttacaggcttataggcagaaagaacttgcttgtctcagatgagactttggactgtggacttttgagttaatgctgaattgagttaagacattgggggactgttgggaagacatgattggttttgaaatgtgaggatatgagatttggcaggagccaggggcagaatgatgtagtttggccctgtgtcccctcccaaatctcatcttgaattgtactcccataattctcatgtgttgtgggagggacctagtgggagataatcgaatcgtgggggcggtttcccccatactgttctcgtggtagtgagtaagtctcacgagatctgatagttttatcaagggtttctgcttttgtgtttccctcattttctctggccactgccatgtaagaagtgccttttgcctcctgccatgattctgaggcctccccagccatgtggacctgcaagtccaattaaacctctttttctcagtctcaggtatgtctttattagtagcgtgaaaatggactaatacagggtccaacgtcatcattttgctgtggatatccagttttccgcagaatttgttgaaaaacacttgtcctttcccatttaatggtcttggcatccttgtcaaaaatcatctcactgtatattaagggtttatttctgggctctccatgtcttttactgatctatatgtctgtctatgtaattttgacctcaaggttccttgagatgaatttaagaatggatttttctctttctgaaaaaaaattgagattttgataggattgctttgaatcaacggatcactttgggtactatagccatcttaacaatattaagtcttctaattcatgaacatgggatgtctttctggtatttttgtctttaatttatttcagcgatgatttgcagttttcagtgtacaagtcttttggccccttggctaagtttttcttaagttttttattcttttggacactaccataagtggaatttttttcttacagtgagctgtgatcttgcagtgagcctcagttgtgccacttcggtttttttttcttttctaaagcaaataacaagacacagtttaccatttttactttttaaaacctaaccttggctgggtgcagtggctcatgcctgtaattctagcactctgggaggccgaggtaggtggatcacttgaggccaagaattcaagaccagcctggccgacatggtgaagctccatctctactaaacatataaaaattagctgggtacctataatctcagctacttgggaggctgaggtgggaggatcacttgaacccgggaggtggagactacagtgagccgagatcgtaccattgcactccagcctggatgatagaatgagactccatctcaaaaaaaaaaaaacatacaaaaaaaaccccacccagccttaacactacatatttttatttttacttttttaagacaaattctcactctgtctctcaggctagagtgcagtggcccgaactcactgcagccatgaacccctgggtttaagttatcctcccacctcagccttccaagtaactgggactacaagcatgcaccatcacacctggttaatttttaaaattttttgtagagatggggccccactatgttgcccaggctggtctcgaactcttgggctcaagtgatcttcctgtgtcatcctcccaaagtgctgggattataggcgagagccaccacacccgacctcatatgcctttttcacatcctggggtgaggcatgtctctgcatgcctggaacttagtggtaagcctccatgttgtaacagatggtgggaccaggtccaagaatgcaggcagccagtggtgggaagcaggggaggctgaaggcgacccgggtatcctctgggcttctgcagggttgtgctggtggtgatagtggtggaggttctttgtgctttcgtttttctcctttctccaacaacaaactggaattggtttcttttttcattgttgttgttgttgttgtagagacagggtctctgtcacagaggctgggatgcagtggtatgatcacagctcactgcagcttcaacctccagggctcaagtaatcctccagcctcagcgtcctgagtagctgtgactacagaaagcaccagcatgcctggctaatcttaaaattttttgtggagatggggtcttgctatgttgcccaggctggtcttgaactcctgggctcaagtgatcctcccatctcagactcccaaagtgttgggattacagatgtgaaccactgtgcctggcctgtttgcctaatttccttttcagattgttcgttgttagtggtgtagaaatacaattgattttttttttttttttgagatggagtctcgctctgtggcccaggctagagtgcagtggtgtgatctcggctcactgcaacttccgcctcctggtttcaagcgattctcctgcctcagcctcccgagtagctgggactacaggcgcgtgccaccattcccagctaatttttgtatttttagtagagacagggtttccccatgttggccaggatggtcttgaactcttgacctcatgatccacctgtctcagccttccaaagtgctgggattacaggcgtgagccaccgtgcccagccaataaaatcgatttttgggggttgattttgtattctgcaaatttgctcaatttgcttattttaacaggcttctgtggacatgtgtgtaacttctgggatactctatgtataagatcatgtcatctgcaaacagagatcattttattccttcttttccagtttggatgcagaaattttcaatttctgtttcatgcctagtcacattggctaaaacttcatagagagagagagagggatacggaatcttggtctgtcacccaggttggagtgccgtggtgtgatcttggctcactacaacctccacctcccacgttcaagcaatcctcctgcctcagcctccccagtagctgggattacaggcatgtgccaccacgcctggctaatttttgtattttcagtagagatggggtttcaccatgttggccaggctggtctcgaactcctgacctcaagtgattcgctcatcttggcctcccaaagtactgggattacagacatgagccaccacacccggcctgtaggatgtttagcaacatctctggcctcatccctctaggtgccagtagcaccaccatccactccagttgtgacaatcaaaattgtttccagacatggcgattgttccctaaggcctggggcagagtaggagagtggaatcatccttgcttgaggatcactattctgcactaaaaaagaatcaaaaaggatatgtagggttctcttttccataatatgtatttattattttttaattttttcgatacggagtcttgctctgttgcccaggctggagtgcagtggcacaatcttggctcactgcaacctccgccctctgggttcaagcaattctcctgccttaccgtcccaagtagctgggattacaggtgcatgccaccacgcccagctaatttttgtagtagagatgggttttcgacatgttggccaggctggtctcgaactcctgacctcgtgatccgcctgcctcggcctcccgaagtgctgggattacaggcatgagtgaccatgctcagcctatatttaaatttttatttcccccgagatggagtttcgctcttactgccccagctgaagtgcaatgatgcaatctcggctcactgcaacctccgcctcctgggttcaaagtgattctcctgcctcagcctcccgagtagccgagattacaggtgcccgccaccacacccggctaattttttgtatttttagtagagatggggtttcatcatgttgcccaggctggtctcaaattgctgacctcaggtgatccaccctccttgacctcccaaagtgctgggattgtaggcgtgagccatcgcgactggactatttttaatatttaaagtgattcatttttatagccagaaaagaacattttgaaattattggccaggtacactggctcatgcttgtaatacaaaaatacaaaaattagccagctgtggtggcttgtgcccatagtcccagctacttgggaggaccacttgagcccaggaggcggaggttgtagtgagccaagatcatgctactacactccagcctgggcagcagagcgagcacttttctcaaaaagaaagaaaaaaagaaattatttacatttattgagcacacaatatgtgccaagcagtttacccatatattaaaagtattgatatttgccgggctcagtagctcacacatgtaatcccagcacattgggaggccaaagcgggtagattacctgaggtcaggagttcgagaccagcctgaccaacatggagaaaccccgtctctactaaaaaaaaaaaaaaaaaaaaaaaaaaaatacaaaattagccgggtgtggtggcacatgcctgtagtcccagctactcgggaggctgaggcaggacaatcacttgaacccaggaggtggaggttgcggtgggccaagatcgtgccattgcactccagcctgggcaacaagagtgaaactccgtcaaagtctgttttgttttgttttgtttgagatggagtctcgctctgtcacccaggctggagtgcagtggtgcaatctcggctcactgcaagctccatctcccagattcatgccattctcctgactcagcctcccgagtagctgggactacaggcgcctgccactatgcccaactaattttttgtatttttagtagagatagagttttgccgtgttagccaggatggtctcgatctcctgacctcgtgatccaccccccttggcctcccaaagtgctgggattacaggcgtgagccaccatgcccagcaaaaaataaaataaataaagtattgatgtttattgctggatttggtggctcatgcctataatcccagggctttcaaaggctgaggcaggaggatcacttgaggccaggaatttgaaaccagcttgaaaaatatagtgagaccttcatctctaaaaataaaaaaattaatcaggcagggtggtgtgtacctatagttctagctactcaggaggcagagtcagaaggattgcttgagcccaggagttctaggctgcaaggagctatgaccatgccactgcactctagcctaggtaacagtgaaacttgtctcttaaaaaaatatgtgttggccgggcatggtggctcacgcctgtaatcccagcactttgggaggccaaggcaggtgggtcacctgaggtcaggagttccagaccagcctggccaacatggcgaaaccctgtctctactaaaaaagtacaaaaattagccgggcatggtggcgagcacctataatcccagctactcaggaggctgaggcaagagaagcttgaacccaggaggtggaggttgcagtgagccaagatggcaccattgcactccaacctgggcgacaagagtgagactctgtctcaaaaaaaaaaaaaatgtgttgatgtttattgagcagagactcagtaggatacactttttcttttctcttttttctttttgagacagagtctcaccctgtcgcctaggctggagtgcaatggtgcaatctcagctcactgcaaccttggcctcccaggttcaaatgattctcctgcctcatcctcctgagtagctgggattacaggtgcacaccaccatgcccagctaattttttttttttttttgagatggagtttcattcttgttgtccaggctggagtgcaatggcacaatctcagctcattgcaacctccacttccctggtttaagtgattctcctgcctcagcctcccaagtagctaggattacaggtgcactccaccatgcctggctaattttgtatgtttttttagtagagacagggtttctccatgttggtcagactggtctcaaactcccgacctcaggtgatctgctcacctcggcctcccaaagtgctgggattacaggcgtgagccaccacaccctgcactatttttttttttaatctttagtagagattgggtttcaccatgttggccaggctggtctcaaactcctgaccttgtgatcctcctgcctcaggctcccaaagtgctgggattatagacatgagccaccacgcccagccaagactcagtaggatacactttttttgaagtaattattttattgatgtttaaaaaattaataggctttattttttagagcaattttaggtttatagtaaaattaagcagaaatttcagagagctctcatatacgtcttctattctccttcacccccacaatttcccctattattaatatctttcattagagtggtatatttgttacaatagatgaacaaatattaatacattattattattattattatttgagacagagttttgctctgtcacccaggctggagtgcagtggcatgatctcagctcactgcaacctctgcctcctgagttcaggcaattctcctgccttagcctcccaagtagctaggattacaggtgtgtgccaccacgccctgctaattttttgtgtgtttagtagagacggggtttcaccatgttggtcagtctggtctcaaactcctgatctcaggtgatccacctgcctcggcctcccaaagtgctgggattacaggtgtgagccaccgcacccagcctaatacattattattactgaagtctaccttttacattagggttcactcttgggttgtgtattctattggttttgacaaatgcacaatgatgtgtatccaacatcacaacctatcatactgaatattttcactgccctaaaaatcccctgtatttggctgggtgcagtggctcatgcctgaaatcccagcactttgggaggctgaggcgggtgaatcaagaggtcaggagttcaagaccagcctgaccaataaggtgaaaccctgtctctactaaaaatacaaaagttagctgggagtggtggcgctcatctgtagtcccagctacttgggaggctgaggcagaaggatcgctggaacccaggaggtggaagttgcagtgagctgagaccatgctattgcattccagcctgggtgacagagcgagactctgtctcaataaataaataaatagtcccccatggttaatctatattggtcttgcttttagcgtcctcctcagttctattcattttgttaatttattcttttttattttctgtaaatggtcatatcatctggtttcaattctttttcttatcttattgcattgtccagcacctccacataagcacgaaatattagccatgatttgaggcattcctgcctcattcttaaatatgttgtacatcctgttttaccatcttttttgttttgtgtgtgtgtggaggtggggacagagtcttgctatgtcacccaggctagagtgcaatggcacaatctgagctcactgcaacctctgcctcccaggttcaagtgattctcctgcctcagcctcctgagtagctgggattacaggcacatgccaccacgcctgactaatttttgtgtttttagtagaggcagggtttcaccatgttggccaggctggtctcgaactcctgacctcaggtgatctgcctgcctctgcctcccaaagggctgggattacatgtatgaaccactgcacccggctctgttttaccatctaacaggatgcaggtgattcctttctaatcaccatcaatggtgatcagaacttttaagaaaaattctaagaacttaaaaaaaaaaaaggaaagtggtttctgaatgttatctaaagtttttccatggtgaaataatcacgtggaatttttctccttttatcttttcattgaataaatgaagctttctaaagctgaactttccttgtctctttggaataagaccccgcatactcctagtatagtgtcttttaaagcacagctgaactcaatttgctaatgttttattcagcatttttgcatgcaccaagagccctgacctcttcctggcagctcagtaccctgcagctgagccgattcccataggaatcctggaacttctgcataaggtcaactgggtgacttcaaccaagcagctccagaggcctcctcccagaatctcctcttcctctgggcaaccctgctgcctaccccagcaccccaggcagtgcccttgcctcctgttcctcctcgtcctctgagccctgtcttgcagccctgttgaatgttctcctaaatggctgggaggtggggcccctccccttcaggtccacaggcttgtctctgtctcccctgctgatcttggtatctgtagcttaagccaatactgaggccctgaattcctattctttctggtacagcgggagagttgtcaagaagccaggtggagcagaagacaagaccaggcaggaagcaggtaagtttccactggaatgactccacttgcctcctaccgaggcccagggctgtgtcagcttcaggtgcagctggctccaggcccacctggggcacagcacggcaaggatggaaggtctcccctacatcctattctccccagagccaggtctgagacgggctgggattgaggatcatcccaaaactggtggctctcaggaggtagctcacctcatgccacctaccccaccaagatggaatctttttttttttttttttttgagacagactcttgctctgtcacccaggctggagtgcagtagcatattcttggctcactgcaacctccgtctcccgggttcaagcgattctcctgcctcagcctcccgagtagctgggattacaggcacccgccaccacacccagctaattttcatatttttagtagagacaaggtttcgccatgttggccagtctggtcttgaactcctgacctcaagtgatctgcccacctaggccttccaaaatgctgggattataggcgtgagccaccactcctggcctaaggatggaatcttgatgaaattgctgtgtggcctgcagccagtcgctgcccctctctgggtcatccacgttgctttctccaagtcctgacctggcaatggattgttcaaggagctggtcaaatccacagttgccccagcaatgcagagccctcaaacatgaaaaaaaaaaatctagacagaaagatttttttttttcttagaaaaatgagccaggtgcagtgcctcacgcctgtaatcccaccactttgggaggtggggcgatcatctgagcccaggagtttgagaccagcctgggcaacatggtgaaactgcatctctacaaaaaatacaaatattagcctggtatggtgatgcatgcctgtggtcccagctacacaggaggctgaggtgggaggatcgcccgagcctgggaagttgaggctgcagtgagttgtgatcatgctactgcacttcagcctgggtgatgggagtgagaccctgcctcaaaaatctaaaaaaagaaaaaaaaagaatattagattacaaaattcacattactgtggaaattgcttttgcccttccaaaacaaatcataaaacatgtttcctggtgaatacatacaaatcttactaaatcttcttttgaatacatataaatcttattaaatcttcttttaatttatttttttaaatttggcttttcttttttctttttaatcacaaaataatttcaagagccaatttgtcctggaggccttgttatgaaaatctgcagacccctgcggctctcatgtttgacgaaatcaagaaaaacattaacacaatcgttgcagaagggtgaccaatgcggttgctttgcggctgagtattggttttatttcaaaacacaatgtaagaggaacaaacaaaacacacatcccactcaacaccacacttctgacaccagatgtgtgggttgtctttattttttccacatagtaagcaattctccagtggacaccagctgggattcctctgatgcaatttggttccgatgctatctactcggacacagcatcagatcccgcaggttaagggctcaatcccacaaaacagcccgccttgagacacaatggtctctatagagtgggataccccacccttgcaacctgcagatgtgttcatcaactcggaagctcttcaaaccccatcttttggggatttttatgggggcttcattatgaaggcatgattgattattaactcagtccctagcccctctccggtctccagagaaagagggtggggctgaaagctccaagcttctaatgatggcttggtcttgttggtccccacccaggaacccaccaagagtcatctttttagaaccaaagacgctcctatcacccaggaaactctaggggatttaggagctctatgtcagacactcccatcactctgtcaggaactggggtcaaaagaccaaatatttatttatttatttatttattattattttgagacggagtctcgttctgttgtcaggctggagcgcagtggtgcgatctcagctcactgcagcctccgcctcctgggttcaagcgattctcctgcctcagcctaccgagtagctgggactacaggtgtgcgccacaggcctggctaatgtttgtatttttagtagagatgaggttttgttatgttggccaccctggtctcaaactcctggcctcaagtgatctgcccacttccacctcccaaagtgctgggattacaggcatgagccaccctgcccagactatttatttttatttttaaacttttctttagaaaaagaatcttgctgtgttgcccagggtggagtgcagtggggagatgttgattcactgcagcctcaaactctcaggctcaatcaatcctcccacctcagcctcccgagtagctgggactataggcacacaccaccatgcccagctaattttttatcttttgtagagacagcaactcactaagttgcccaggctggtcttgaactcctgggctgaagcaatcctcctgcttcagcctcccaaagtgctgggattataggcatgagccaccacacccagccccatgccctgtttttcactggtgcatattttctaccagaaatgagagttttaggtatgaatgaagactagtctgtgtgaaaacctgtaattgtgcttttgaaaaaagatctccaggtcttcacaaaactttttattccctgaggatgccccactgcaaacgcctgtgaagctggagtgccagacactgaggcctgaggctgggggacacagaggctaccagcttgcttggacctcctcaatctgtcaaagaaactggcttggggaccactggaggacccaaatctccctcttctctgggcagtgggtcttgtgcatgctggccttggacctactgaaggcccttccagccccagtgctattctctgaattcatggggagcagaggtgttgggactgagtcctgttggagactccagaaacactgacgtttcttgtttggtcctggggttaggtaacgacggctgtttctttttttctttctttctttcttttttttttttttttttttgaggtggagtcttgctctgtcacacgggctagaatacagtggtgtgatcttggctcactgcaacctccaccccctgggttcaagcgattctcctgcctcagcctctcgagtaactgggattacaggcatgcaccactacccccagctaattttgtatttttagtagagatgggatttctccatgttggtcaggttaatctcaaactcctgagctcaggtgatccacccacctcggcctcccaaagtgctgggattacaggtgtgagccaccacacctggccagcaatttatttttagtcagttgtggactatcctgggtggctcctgcctagattattctaagaatttcttttttcttttttttttattttaagacaaggtcttactctgtcgcccaggctggagtgcagtgatgtgatcttggctcattgcaacctccacctccccagttcaagcaattctcctgcctcagcctcccaagtagctgggattacaggcacctgccaccgtacccagctaagttttgtatttttagtagggacggcatttcaccatggtggccaggctggtcttgaactgctcatctcaggtgatccacccacctcggcctcccaaagtgctgggattacatgcttgaaccaccggcgcctggcctattctaagaatttcaccatttggacagctattagccagctttggttggtcatgtgggtccccactgcattcaactcagtcctagcctgatcttcagtttccaacaatatcataatatcattgagatagtgtattattacacttaagatctgcaccaagtccaaatcccacttctgacaccaaaagtaaaaagaaaacataaattaatttttttttctgctcacacatcactcaacacaacattcctttcttttcttttttcttttttgagacggagtctcattctgtcacccaggctgtagtgcaatggcgtgatctctgctcactgcaaccttctgcctcccgggttcaaacgattcgcctacctcggcctcccgtgtagctgggactacaggtatgcaccaccatgcccagctaacttttgtatttttagtagagatggagtttcaccatgttgcccaggctggtctcgaactcctgacctcaggtgatctgccagcctcagactcccaaagtgctgggattacaggcatgagccactgtgcccagccttaacacaacatttctgacaccagatgtatgggaacttttccaaacgtcaagtaattctccagcagacaccagctgggtggggttttttgtttgatttttttgtctttttatttttttaggtgggtgtttttaaattcaattcagttcagaagctatctacctgaagatagtatcagatcccataggttaagggctcagtcccacaagatggtccctactgcagatgccatctgcaaacagtaggttttcacctgtacttctaatgcactggctgtaaatcaagactcccttaggctgggcacagagtcccctcctgtaatcccagcactttgggaggccaaggtgggaagatcacttgagctcaggagtttgagaccagcctgggcaacatggtgaaaccccatctttacaaaaaatacaaaaaattagctgggcatagtggtgtgcacctgtggtcccagttacttaggaggctgaaatgggagaatcgcttgagcccaggaggtggaggttgccgtgagccaagatcgcatcattgcactccaggctgggcaacagagcaagaccccatcttaaaaaaaaatggtggctggccgcagtggctcatggttgtaatcccagcactttgggaggccaaggtgggcagatcacctgaggtcaggagttcaagacccgtctctactaaaaatacaaaaattagctgggtgtggtggcatgtgcctgtaatcccagctactcaggaggctgagacagaagaatcacttgaacccaggaggcggaggttgcagtgagccgagattgcaccattgcactccagcctgggcaacaagagtgaaaatgtcatctcaaaaacatttttttaagtactatttttttaaagaagtgggggtggccaggtgcagtggttcacacctgtaatcccagcactttgggaggccaaggtgggagaatcagtcaagctcaggaattcaagaccagatagcacaacatggtgaaaccctatctctacaaaaaaatacaaaaaaatagccagctgttggaggcacacacctgaggtccctgctacataggaggctgaggtgggaggattgcttgagcctgggagatggacactgcagtgagccaagatcaccccagcactccagcctcggtgatagaacaagaccctgctaaaaaaaaaaaaaaaaaaaaaaaaaggtggctaggcacagtggctcatgcctgtaatctcagcactttgggaggctgaggcaggtgatcacctgaggtcaggagtttgagaccagcctggccaacatagtgaaaccccgtctctactaaaaaaaaacttagccgggcatggtggcacacatctgtaatcccagctacctgggaggctgaggcaggagaattgcttgaacccaagaggtggaggttgcagtgagccaagattgcgccattgcactccgccctgggcaaaaagagtgaaactccatctcaaaaaaagaaaaagaaaacaataatactcacacctgtaatcccagcactttgggagcctgaagcgggcggatcacctgaagtcaggagttcaagaccagcctgaccaacatggagaaatctcgtctctaccaaaaatacacaattagccgggtgtggtggcacatgcctgtaatcccagctactcaggaggctgaggcaggagagtcgcttgaacctgggaggtggaggttgcagtgagccaagattgcaccactgtattccagcctgggcaacaagagcgaaactccatctcaaaataataataataataaaaaaagattcaggtgaacagccagatgaggagatacctagagcagggtctggagggagacaggagcttctgcctccatggagtggggtccaccacccttctggtatgtggaagtgtttaccaatgtggaagctcttcaaactccgtagttgagggatttttatggaagctttattatgaagccatgatcgattattaactccatttccagcccctcttccctctccagagaaagggggtgaggctgaaagctccaggcttgtaatcatggcttggtcttcttggtccccaacccaggaacctcccaagcgtcacctcattagaacaaaagacactcctgtcacccaggaaatcccaaggaaatttggaactctgcgtcagatgttcccatcagactacatcagattacaaagttctcaggagctctgtgtcaggaactgggacaaagaccaaatatttatcttaccataaatcacaataccagccaggcacagtgactcacacctgtaatctcagcactttgggaggctgaggtgggtggatcacctgaggtcaggagtttgagaccagtctggccaacatgcagaaaccccgtctctactaaaaatacagaaattacctgggcttggtagtgcacacctgtaatcctagctactcccgaggctgaggcatgagaatcgcttgaacctgggaatgggagcttgcagtgagccgagatcccaccactgcactccagcctgggcaacaggctgcctaaaaacaaaacaaaacaaaaaagtgtgcccttggctggaggtgtggccagagtaaagaccccagcctcagttgctggtggggaaggtcatgtttgatatagggaaagaggcaccagattggcagctatcagaacaaagggaaaacacacccaaggtgaacaaaggctgcagggagcccacagattgcagtttactggggagaaatgtcaagttcagaaagcaaacagaggctttgtgtctctgaggggcttggttgcacgttaacgcccggttcctgccccagcccaccctggcccagccatcctgcacggaagcacaggctgtttgctgaattcaatccttgcctaaacatttgtttatttgagacaagatgcctgcgggggcctcatggccaggtcagagctcacagctggggcagaggaggagaggctgcagaaggctggacctgtaggtttgtctccaactctgagactccaggcggggagtcctggggtcagagcatggacagggctcatagtgttgggtcacagactcaagactctccaggtttcctcataaaaaggaaggaaacagccgtgcgcagtggctcacgcctgtaatcccagcactttgggaggcagaggcaggcagatcacttgacgtcaggagtttgagaccagtctggccaacaaggcaaaaccccatctctacaaaaaaaaaaaaaaaaaaaaaaacacaaaaattagccaggtgtggtggcacgcacctgtaatcccagctactcaggaggctgaggcacaagaatcacttgaacctggaaggtggaggttaaagtgagctgagatcccaccactgcactccagcctgggcaacagagtaagactgtctcaaaaaaaaaaaaaagagagagagagaaaatctaatgcctgatgatctgttactgtctcccatcactcccagatgggactatctagttgcagaaaataaagctcagggctcccactgattctacattatggtcagttgtattattacaatgtaataataacagaaataggccaggtgcagtggctcatgcctgtaatcccagcactttgggaggccaaggcaggtggatcacgaggtcagaagttcgagactagcctggccaatatggtgaaaccccgtctccactaaaaatacaaaaatggctccctctccctctccccaccatctccctctccctctctccacggtctccctctgatgccgagctgaagctggacggtactgctgcctgattctcctgcctcagcctgccgactgcctgcgattgcaggcgcgcgccgccacgcctgactggttttcgtattttttttggtggagacggggtttcgctgtgttggctgggctggtctccagctcctaaccgcgagtgatctgccagcctcggcatcctgaagtgccgggattgcagacagagtctcgttcactccgtgctcaatggtgcccaggctggagtgcagtggcgtgatctcggctcgctacaaccttcacctcccagcagcctgccttggcctcccaaagtgccgagattgcagcctctgcccggccgccaccccgtctgggaagtgaggagcgtctctgcccggccgcccatcgtctgggatgtgagaagcccctctgcctggctacccagtctggaaagtgaggagcgtctctgcccagccgccatcccatctaggaagtgaggagcgcctcttcccggccgccatcccatatgggaagtgaggagcgtctctgcccggccccccatcgtctgagatgtggggagcacctctgccctgccgccccgtccgggatgtgaggagcgtctctgcccggccgccccatctgagaagtggggagaccctctgcctggcaaccgccccgtctgagaagtgaggagcccctccgcccggcaaccgccccgtctgagaagtgagaagcccctccgcccagcagccaccccgtctgggaagtgaggagcatctccgcccggcagccacctcgtccggcagggaggtgggggggtcagccccccgcccggccagccgccccgtccgggagggaggtggggggggtcagccccccacctggccagccgccccgtccgggaggtgaggggcgcctctgcccggccgcccctactgggaagtgaggagcccctctgcccagccagccgccccgtccaggagggaggtggggggtcagccccccgcccggccagccgctccgtccgggagggaggtgggggggtcagccccccacccggctagccgccccgtctgggaagtgaggggcgcctctgcccggccgcccctactgggaagtgaggagcccctctgcccggccagccgccccgtccgggagggaggtgggggggtcagccccccgcccggccagctgccccatctgggagggagatggggggtcagcccccgtcccggccagccgccccgttcgggaggtgaggggcgcctctgcccggccgcccctactgggaagtgaggagcccctctgcccggccaccaccccgtctgggaggtgtacccaacagctcattgagaacgggccatgatgacaatggcggttttgtggaatagaaaaggggggaaaggtggggaaaagattgagaaatcggatggttgccgtgtctgtgtagaaagaggtagacatgggagacttttcattttgttctgtactaagaaaaattcttctgccttgggatcctgttgatctgtgaccttacccccaaccctgtgctatctgaaacacgtgctgtatccactcagggttgaatggattaagggcggtgcaagatgtgctttgttaaacagatgcttgaaggcagcatgctcgttaagagtcatcaccactccctaatctcaagtacccaggaacgcaaacactgcggaaggccacagggtcctctgcctaggaaaaccagagacctttgttcacttgtttatctgctgaccttccctccactattgtcctgtgactctgccaaatccccttctgtgagaaacacccaagaatgatcaattaaaaaataaaaaaaaataaaaaataaaatacaaaaatgagctgggcagggtggcgggcgcctataatcctggctacttgggaggctgaggcaggagaatcgcttgaacctgggaggcagaggttgcagtgaaccaagatcgcaaatttccctccagcctggtcaacaagagcgaaactctgtctcgaaaaaacatatatataataatactaaagtgcacagtaaatgtaatctgcttgaaacattctgaaaccattcccctccctgcctcctgagtagctgggactacaggcacatgcagcacacccagctcatttaaaaaaaaaatgatttttttttttttttggtagagatggggctttactatgttgtccatgctagtcttgaactcctagcctcaagggatcctcctgccttggcctcagaaagcactggattccaggccataagccaccactgttttttttttttttttttttgagacggagtctcactctgtcacccaggctggagtgcagtggtgcgatctcagctcactgcaaactctgcttcctgggttgaagcaattctcctgcctcagcctcctgagtagctggaataacaggcatgcaccactaattttttgtatttttagcagaaacggggtttcatcatgttggtcaggctggcctcaaactcctgacctcaagtgatctgcctgccctggcctcccaaagtgctgggattacaagtgtgagccaccaccgccagcccttttgcttatttatctagcattaagaaatccagaacgaggtagcttcacaagtttcttcttggttgttttgttgttgttgtttttgttgttgtttagagagagtctcgctctgttgcctaggctggagtgcagtgacgtgatctcggctcactgcaacctctgcctcctgggctcaagcaattctcctgcctcagcctcccgagtagctgggactacaggtgtgtgccaccatgcccgggtaatttttgtatttttagtggagatggggtttcaccatgttgtccaggctggtcttgaactcctgacctcaggtgatccagccaccttggccacccaaagtgctgggattataggtgtgagccaccacacctggtccacatgtttcttctttacctgctccatgatgccacagattttcttttaggttctgccatctctagtgtgttccctttttcctcatgcttgttgcctcttgttgcagaatggctgctgcagctccagacatcacattcaaggcagaaacaagagggtaagggggaaagccagctgcatttccctttgatcagataaaggcataaaaatatttcctagaaattcccatggcatccttcctcttagggctcattggtcagaactgggtcctgggccacctctacctgcagaggcagctgggaaactggagaatagaaagccattgtcttttaaatctaatttcagaagtgatggctccttgcttctattgcataatattgattaaaaggcagtcagtaaaggctgggcgtggtggctcacacctgtaatcccagcactttgggaagccaaggcaggcagatcccttgaagccaggagttcaagaccagcctggccaacatggtgaaaccccatctccactaaaaatacaaaaattagccaggtgtggtggtgggcacctgtaatcccagctactcactcgggaggctgaggcaggagaattgtttgaacccaggaggcagaggttatagtgagccaagatcaccactgcactccagcctgggtgacagagtgagaccctgtctcaaaaaaaaaaaaaaaaaaggcaatcagctcgcattcgaagagagggaattcgagaaaagtcagaatgccaggaggtggggatcactgcaaaccatcttaaaggcttcccccatggccaaatgcactggctcatgcctgtaatcctagtgctttgggagtctgaggcaggaggatcgcttgagttcaggagttcaagaccagcctgggcaacgcagagtgaccccatccctacctcaaaaaaaaaagaaaaaaaagaaacatttagctgggcattgtggcccatgcctttggtcccagctactcgggaggctaaggcaggaggactgcctgagctcaggagtttgaggctacggtgagctgtgacagtgccaatgcactccagcctgggcaacaaagcaagactctgtctcaataaacaaataaatgagtgagccacacagtaatcccttaagggaaggggttttcttttttttcttttctttttttttttttttttttttttttgagacagagtctcactctcttgccaggttggaatgcagaatgtactgtgagacaatacatttctgcagtttttttgtttttctgcttttggttgttgttgttgagacagtgtcttgttctatcacccaggcaggagtgcagtggcacgatctcggctcactgcaacctccgcctcccgggttcaagcaattctcctgcctcagcctcccaagtaactaggactacaggcatgcaccatcacatccggttaatttttgtatttttagtggagacggggttttaccatgttgtccaggatggtctcaatctcctgacttcgtgatctgcccacctcggcctcccaaagtgctgggattacaggtatgagccactgtgcccggccagggaagggattttctaaggtcagttaaacagttcctgcagctgctgaggcgtccctaagaacacattgactattatcacaacaaggataatcccaatatttgtttccagtcttgatgggctgggcttactgatagggttgtaatgatttcagcagaagcagtttgtggacataagattaagatccaattttgaaggatgaaggttgagattaagtatgtgaagaaaatgtacattctaggaggggcctaaagaaggaaatctatgacaggaggttcctgaggctgatgtaacccagctccacaaactaggtggcttaaaacagcagaaaaggccggacatgatggcatacacctgtaatcccagcactttgggaggccgaggcaggaggattgcttgagccaaggagttcaagaccaacctgggccacgtggcgaaaccccgtatctaaaaaaatacaaaaagttagccaggtatgatggtgcacacctgtagtcccggctactagggaagctgaaatgggaggattgcttgagtccaggaggtggaggttgcagtgagctgagatcgtgccactgcactcccgcctgggtgatagaacaagacactgtctcaacaacaacaataacaaaaagcagaaaaacaaaaaactgcagaaatgtattgtctcacagttctagaggccagaagtccgaaatcaaggtgtgggcagtgctggttccttctggagactcctagagagaatccatcccaggcctctctcctggcttcagccatccttggcaattccttggcttgtggcctcatctctccagtcactgccttcttcatcacatggccccatgttccaaattccctcgtctttgttttttggttttttatttatttattatttatttatttatgagatgaagtttcgctcttgttgcctgggctggagtgcaatggcgtgatcttggctcactgcaacctccgcctcccggattccagcaattctgactcagccttccgagtacctgggattacaggctcgcgccgccacgcccaggtaattttttgtatttttagtagagatggggtttcaccgtgttgaccaggttggtctcgaactcctgacctcagggtgcctctgcctctcaaagtgctgggattacaggcacgagccactgtgcccggcctgattttttattttttagacagagtctcactctgtcacccacgctggagtgcagtggcataatcatggctcattgcagcctcaacctcctgggctcaagcaatcctcccacctcagcctcctgagtagctgggaccacaactatgcgccatcacacttggctattttttttttttttttttttttgagatggagtctcactctgtcgcccaggctggagtgcagtagcgtgatctcggcccactgcaacctccacctctcagcttcaagtgattctcgtgcctcagcttcccaagcagctgggattacaggcgaccaccaccatgctgggccaatttttgtatttttagtagagacagggtttcgccaggttggtcaggctggtctgaaacgccagacctcaagtgatccgcccaccccagcctcctaaagtgctgggattacaggcgtgagccacagtgcccagccccacacttggctaattttttaaatttttgtgtagatggggtcttgccatgttgcccaggctggctttatttattttaagcccttcttttttgcccaattcatttaacactttatttattatttttgaaattattctttctatttttattcatttttttaggagacagtgtctcactctgtcactcaggctggagtgcattggcatgatcaatgttcactgcagcctcaaccttctgggctcaagtgatcctcctgcctcagcctcctgaatagctgagactacaggtgcatgcccccatgcctggctaattttttttttgagatggagtctcgctctgtcgctcaggctggagtgcagtggcacaatctcggctcactgcaagctctgcctcccgggttcacgccattctcctgccttagcctccccagtagctgggactacaggcgcccgccaccacgcctggctaattttttgtatttttagtagagacagggtttcaccgtgttagccaggatggtctcgatctcctgacctgttgacccgcccgccttggcttcccaaagtgctgggattacaggcgtgagccaccgcgcccagccctggctaatttttaaaactttttttagatagagacatggtctctctatgttgcccaggctggtcttgaactccagagatcaagtgatcctctggctttagcctctcaaagtgctgggattacaggcatgagccactgtgcctggcttttttgtagaaatggggtcttcttgtgttgcccaggctggtctcaaacttctaggctcaaagcaatcctccctccttggtcttccaaagtgctggaattacaagtgtgaactgccatgcttgaccctagacatttcttcttcttcgtctttgagacagagtctcactctatcacccaggctggagtgcaatggcacgatctcagctcactgcaaacctccgcctcctgggttcaagcgattctcctccctcagcctcccaagtagctgggattacaggcaccaccaccacacccagctaacttttgtatttttagtagagacagggtttcaccatgttgatcaggctggtctcgaactcctgacctcaggtgatttgcctgcctcagcctcccaaagtgctgggattataggtgtgagccaccatgcctggccatgaccctggacattttttttttttttttgagacagagtctcgctctgtcgcccaggctggagtgcaatggcgcaatcccggctcactgcaacctctgcttcccgggttcaagagattctcctgcctcagcctcccgagtagctgggattacaggtgcccgccaccacgtccagctaagttttttgtatttttaatatagatggggtttcaccaggttaccaggctggtctcaaacccctgacctcaggtgatccacccgcctcggcctcccaaagtgctgggattacaggcgtgagccaccatgcccggcctaccctggacatttttataaatggaatcagacactctatgggcttttgtgcctggcttctttcactcagcctcgtgttttcagggttcatccgtgctgtgggatggatcagtgcttcattcctttttatggctgcatagtattccatttcgtggattgaccacagtctgttgatccatgcatcctttaagggaacagctgaattgtttccaccttttggcgatagtgaacaatactgctataaacgtgtgtgtcttttagtcctttttgaatagttaactggagtggatactccttttctcttttttttttttgagatggggtctcactctgtcacccaggctggagtgcagtggtgtgatctcagctcactgcaacttccacctcccaggttcaagcagttctcctgcctcagactcccgagtagctgggactgcaggtatgcaccaccacacctggctgagttttgtatttttagtagagacagagtttcactatattggtcaggctggtctcgaactcttgacctcaggtgatatacctgcttcggcctcccaaagtgccaggattataggcgtgggccaccatgcccagccataaagtggacactcctattctggacatagaatgacaatgatttttctgcacatagaatgacaatgatttttccacacatagaataacagtgattttccttttctttctctctcttttttttaaattggagacagggtctcacttttgtcacctaggctggagtggtgtgactgtatctcactgcagtcactcctttggccaggggatggggaggtttggccatgtctgtggtttggacaatgctcttattttcatctgtggtaagactcaattacggaagggttttgatttttgtctggtttcatcctggacagagtggccctgtttgatgtggtcattctgtgaaatcgtatatgttcaaccaaagaactcctcggcttcactgtgactaccaggtcaactcccagttgaccagagcctggggccaattttttcttctttactttacattcaccttctcgcctttgcatatgctgttcctgctgctcagaatgcctttccctccctgtcttcactcagctctttccttctcaattttcagagtgctcttaaatgccacctcctctgagaagccctctgtgatcacccaggctgtgggcctctataacccatttcagcaccagacacatcttttggtcacagtaaggattttttttttttttttgagcgagggtctcactctgttgctcaagctggagtgcatgcaggcagtgcaatggtggctcactgcagtctccaactcctgggctcaagtaatcctcttgagtagctgggaagacgagcttgccaccacgccagctgattttttttttatttttgtagagacaggggtctctctatcttgtccaggcaggtctcaaaactcctggcctcaagtgatcttcccactttggtctcccaaagtgctaggattacaggcgtgagccactgtggctggcctgtcatctttcaagtttcccaagtgaggagaaaagggatggagaaggccaaaaaaaaaaataagttagaagaacagttcttcctataggtctcaatatgttgccatgttcctattgaaagaaagaaagagaaagagagaaagaaaaggaaggaaggagagagagagagatcagaaagaaaagaaagggaaaggaaggaaagatggaagacaggaaggaaagagaaagaaagaaaagaaagaaaagaaaagaaaagaaaaagggaaaggaaggaagaaaaaagaaagaaaaagaacggagataaagggggctctagacaaacataaaaattggatcttcaaaagataattaattggccaggtgcggtggctcacgcctgtaatcccagcactttgggaggccaaggcgggcggagcacctgaggtcagaagttcgagactagcctggccaacatggcaaaaacccgtctctactaaaaatacaaaaattagtcaggcatggtggctcacacctgtagtcccagcactttgggaggccaaggtgggaggatctcttgagcccagcagttcgagaccagcctgggcaacagagggagaccctatcacaattttttaaaaaacatttcaagtagccaggtatggtggtacacacctgtagtcccagctactcgggaggctgaggcaggaggatcgtttgagcctgggaggtcgaggctgcagtgagctatgactgcactactgcactccagcctgagcaacagagtgagaccctgtctcaaataaataaataaataaataaataacacaacagatgatcgcctcatgagaattttgtctttccgttgtaagtctcctctccagtggaaaagtctcacagtggccactcaaattctaaattgtccccagtgtgaggtaccattggagagagacatgtttggttttggttttgtttttttgagacaggatctggctctgtcacctaggttggagtgccgtattgtgatcatggttcactgcaacctctgcctcccgggctcaagcgattctcctgcctcagcctcccgagtagctgggactacagaagcacaacactgcgcacagcttccttctaagattttgaaatggtgaaaagttgcccaaaggacagtggtccaaggagatctttggaatactttggccatcaacactgactcaagggtgacttactgagtctaggcccgtcctctctttatcgacgtttcccccgatggacccacagtgcaatcccagcactttgggaggtcgaggcaggaggatcacttgagcccaggattcgagatcagcctgggcaacatggcgagaccctgtctctacaaaaagtagaaaaattggctgggtgcggtggctcacacctgtaatcccagcactttgggaggccgagatgggcggatcacaaggttgagagatcaagaccatcctggccaacatggtgaaacgctgtctctactaaaaatacaaaaattagctaggctctgtggtgaggcctgtagtcccagctacttgggaggctgaggcaggaggatcacttgagcccaggattcgagatcagcctgggcaacatggtgagaccctgtctctacaaaaagtagaaaaattggctgggtgcggtggctcacacctgtaatcccagcactttgggaggccgagatgggcggatcacaaggttgagagatcaagaccatcctggccaacatggtgaaacgctgtctctactaaaaatacaaaaattagctgggctttgtggtgaggcctgtagtcccagctacttgggaggctgaggcaggaggatcacttgagcccaggaggtcgaggctgcagtgagccaagattgcaccactccacttttacctgggcaacaaagtgagaccttgattttagacttgaagcctccaggactatgagagaattgatttgcattgtttccttttttttttttgagacagagtcttgctctgtctcccaggctgcggtgcagtggcactatctcggctcactgcaacctctgccccccaggttcaagagattcttctgcctcagcctcctgagtagctgggattacaggcgtacaccaccatgtccggctaatttttgtatttttagtagagacggggtttcaccatgttggtcaggctggtctcgatctcctgatctcaggagatccacctgccttggccttccaaagtgctgggattacaggcatgagccaccacgctcagccaatttctgttgttttcaaaaccactagtttgtggtcatttgctactgtagccaccagaaactcatacagccctgtacaagagacagtccacaggaggaggtgtcgagagagaaaacaatttcaccaaggaacagagtggctgatcagaaaaccaaaaagccgtggagaaactcattcctagaatagtaaacgaaattaaccctacacagaagggccctaatgagatcataactgaagctccagtcagcattaacttaccttccagccacaggcagaatcaccttaagcagatagagacacaagggtctcagatgtgcacactattttttttttttttgagacagagtcttgctctgtcacccaggctggagttcagtggtgcagtctcagctcactgcaatctctgcctcccgggttcaagcgatcctcctgcctcagcctcctgagtagctgggattacaggcacacaccaccatgcccagctactttttgtatttttggtagagacggggtttcaccctgttggccaggctggtcttcaactcctgacctcagatgatctgccttccttggcctccccaagtgctgggattacaggcgtgagccaccgtgcctgacctcagatgggtgcacttttgctgagtccagggtactgattggtggcagggaaggtctcagcccagtctcagtaggacatccagtcctgttgatgtcaaataccaccagaaaaacagctgcagtgaaacccagctgggtttatggattaatgcattgaaggaagacacaccagaaggggttctgtttatctcagaaagagaaagtgagaaggagcgtgttacagaactagggcaactgtggggtgattcgaggagagttcaagggagtgggattctgccctggattgtatgcaaacagctagtgggacaattctctaagtattttaataatctctttttttttttttgagatggagtcttgctctgtcccccaggctggagtacagtggtgtgttctccgctcactgcaagctctgcctcccgggttcacgccattctcctgcctcagcctcctgagcagctgggactacaggcgcccaccaccacacccggctaattttttgtatttttagtagagatggggtttcaccgtgttagccaggatggtctcgatctcctgacctcgtgatctgcctgccttggcctcccaaagtgctgggattacaggcgtgagccaccgcgcccggcctttaataatctttttacctagaaggcgggggaacctgctgggaattggcgaaaactagcagtcacgccctttggccaggagatggggaggtttggccatttttgtggtttggacaatgctcttgtattcacctgtgctaagactcgattacggaagggttttgtttttctgcggccaagtgtgactggtctgagtgtccctgtctgatgtggacattccgtgaaattggtttggtcaatcaaaaaactctacagtttagctgtgactgccaggccaactgctagctgactgtgtgtggtccagggctacttttatcttcctcactttatattcacctcctcacctttgcatatactgttccctctgcccagaacacctttccctctctttttcactcagctctttccttctcaagcttcagagctctccttaaatgccaccacctctgagaagccctctttgatcacccaggctgtgggcctccacaaccctatttcaaccccaggcacatcttttagtcacaattacgattattattttattgttattattattattattacttttgagacagagtcttactctgtcacccaggctgcagtgcagtggcgtgatctcagctcactgcaacctctgcctcccaggttcaagcgattctcctgcctcagcctcccaagtagctgggattacaggcgcatgccaccacgcctgggtaatttttagatggggtttcaccatgttagccaggctggtcttgaactactcaccaagtgatctgcccgcctcagtctcctgaagtgctgggattacagctataagccaccacgcctggcctttattattattatttatttatttattttgagatggagttgcactctgtagcccaggctggagtgcaatggcacgatctcggctcattgcaatctctgcctcctggggtcaagtgattctcctgcctcagcctcccaagtagctgggattacaggcatgtgccaccacgcccagctaatttttgtgtttttagtagaaacagggtttcaccatgttggtcagactggtctcaaactcctgacctcaggtgatctgcctggctcggcctcccaaagtgctaggattacaggcgtgagccaccatgcctggcctttattagtattttttaagagaggttccttcacccaggctggctggagtgcagtggcgctatcatacctcactgcaccctccaacttctgggctcaagtgattctcttgaatgggaggatgagcatgccaccacgcccagctaatgtttttatcttctgtcgagatggggtctcataatgttgcccaggctgctttcaaacacctggcctcaagcgatcctcccaccttagccttccaaagggttgggatcacaggcatgtgccactgcgaccagccaggataataatctttcatgtgattttccgactttaagccccctgcacccagagacctttctgtctcatgcctgaagggaaggaactggccacggaaaaacctgggaaattcctgggggaactccctgaggcaagactgcgcctggcaatttgtaagaagggggctggtgcgacctgagcagagagctaatgggagggtgagggaagccaagggagatggggtgggaggtgggaggagtcttgcgggacaatgggaacccaggggaggcgttagagcaggggaggtgcatcgcgcactgggatttaggtcccagcaaggtcgctggggggatgccttttagggaatggactctgtggtcaactactcctacctgaactgcccccaaagcatttgcttttccctctccacagtcaggaccagtgtaaccttagacccctaatactgccatttttactgttgagaacaccgagaagtagtaaatgcagaaaatctaaagtatagtgcctaagacaaattggcgcctcaaacctaatttctaaataaaattaataaataatattgcagaagtggggagcaggtcagcaatccaggaagaggcactggcaggagcaagagacggaatttgagcctactcgcggttatgagcctactcgcggttacattttggccaaactcaattcctggtctctctgagcctcggtttccctacctggactgcgcggtgtgtgttaatttctctgccccatttatctcccctctcctagccccgccccagcgtcaccagtgggacgcagagactcaggactaggaaagcacttttaaagcgttaagggattgcgaagagctacggagaggcttcctcagggctatactgggtccacctcccctcatggaccgcgggcgcgctctggcggccgggccgctccaggctgaagccgccggaccacgtgtgtagtcgcagctgccatctttcatccgggcatcggccatcttggtaaaggcaatgttctagattttcgcctctgcccgcccctcctggttcatcaacatattaaatgagcgtagggaatgagggcgtattaagtgtcctctttttgaagagacaaagaagtggctgactaccctggcttgggtccgaggcccagccatctttttctttaccaaaatggcggcggtactgaggcgcaatgagtgcgcgccgccaggagctcagcgcgcaggccccatgatgacgtcacggaggcgcgaccgggccggcgctggggtaagaaggtaggagcgtctgcggcgcgggcggaacccgggttcggggagcagaggcgcggggcgggggctgcttggcctgggaccatcccctgggaaggctggaggaggggtgctgggaggcaggagcacttctggcgtccagtctgaaccgcacctagttgggggcgatgcccatttccagactagacgattgaagcccgacgcgacagcatgttcgaggccacctggccccggactgcccctaggcagcttctggtctcgagagggacagagttgggcgcggactcccccggcctcttgtagggggattagtggtgggggacttcaaaagggatagccgggagggctgcttagaggaggcattgttgaattttgtattctgttattttaccttcacatccgtggggtcttaatccccatgggtcttgattcgcttctaagtgtgcccctcgcccagcctgagccactccctgggtaccgcctgggctcccagctcctgccatctggggagtccacctcctcactaaccccagagggcttgtgtgacccatagattgggcttcccggctctaacgccctccacaccttcccatctccctggaatacaaatcgcccccttttccagcctacctcctgcatcccgcgtgcaggctgcgctctcccccactcattcagacttttccttagatgtctcctttaggaagccctttgacccaggctgggtcagaagccctctccgggcttccccggcgccctgcgtgtccttattaggactctgattgcatgtgttggctcttctctgggagtcccatgcaggcagaaagctcatttgtgccacctctttccccagcatcgcacacgtattaggtgcccagtacatatttattgaatgacgtgtgcaagtgagtgagtgtttactacacagagaaaagtgtctgtatttccagcttgggctgtcataactaataccacagactgggtggcttaaacagcagaaattgccaggcactgtggctcacacctgtaatccaggcactttgagaggccgaggcaagcggatcacttgaggtcaagagtttgagaccagcctggccaacatagtgaaaccccgtctctactaaaaatacaaaaatcagataggcatggtggcacatgccaacatggtgaaaccccatctctataaaaatacaaaaattagccgggcgtggtggcaggtgcctgtaatcctagctgcttgggaggctgaaacaggagaattgcttgaaccgggtgggtggaggttgcagtgagccgagattgtgccactgcattccagcctgggtgaaagagcaaaactccgtctcaaaacaaaaaaaagccccaacgtggaaacagcccaaatgtctagctgtggacaatggataaacaaaatgtggcgtatccatgcagtggaggaatattcagccataaaaaggaacgaagggccaggcgcagtggctcaggcctgtaatcccagcactttggaaggccgaggcgggaggatcacttgagcccaggagttcaaggccagcctgggcaacatagtcagaccctgccttaaaaaaaaaaaaaaaaagctaggcatggtggcctgcacctatagtcccagctacttaggaggctcaggtgggaggatcacttgagcccaggaggtcaaggctgcagtaagccgagatttcgccactgcactccagcctgggcgacagagtgagaccctgtctccaaaataaataaataaatgtactctcacactgtgtggccttttgtgtctggcttctttcacttagtattgtgttgttgaggttcaaccacattgtatcatgtatgtattggtgccttgtttccttgtttcctttttttttttttcttttaagagacagggtcttgttctgttgcccaggctggagtgcagtggcacaatcatagctcactgtggcctcagcctcctacgctcaggcgatccttccacctcagcctcctaagtagctggaactacaggcacaagccactgtgcctaattattttttattttgtagagacggactcttgctatgttgcccaggctggtcttgaactcctggcctcaagcaatcctcctgcctcagcctcccaaagcacggggattacaaacgtgagtgatcgcacccggcctgtgattccattgatatggactgaaatgtccagaacagggaaagccacagagacagaaagcagattgatggttaccaggggctaggggaagaggaatagggagtgactgctgatggtgatgtggcctcttttggggggtgcaagtgttctggaactagacagaggtggtatttgcacaacgctgtgaatatacttaaacactgaattgtacacctttttttttttttgagatggagtctcgctctgtcgcctaggctggagtgcagtggtgtgatctcagctcattgcaacctccgcctcccgggttcaagtgattctcctgcctcagcctcccgagtagctgggattataggcatgtgccaccacacccagctttttggttttttttgagagtgagtctcactctgccgcctaggctggagtgcagttgcacgatctcggctcactgcaacctctgcctcccaggttcaagcggctttcctgcctcagcctcctgagtagctgggattaaaggtgtccgccaccacacccagcaatttttatttatttttagttgacacggggtttcaccatgttgactagactggttttgaactcctgacctcaggtgatccgcccaccttggcctcccaaagtgctaggattacaggcgtgagccactgtgcctggccggaattgtccacctttaaattgattctttttcctttcattgagacggagtctcactctgtcgcccaggctggagtgcagtggcacgatcttggctcacttcaacctccacctcccgggttcgagcgattctcctgcctcagcctcctgactggctgggaatacgggtgcacaccaccatgcccagctaatttttgtatttttagtggagatggggttttgccgtgttggccaggctagtctcgaacttctgaccgcaagtgatccgcccgcctcggcctcccaaagtgctgggattacgggtgtgagccaccagacctggcctaaatgagctcatttggtgtcatgatgtgaattttgccttaataaacttttacaaggagagcgctaagtccaaagcccttgttttatacagagaaggccacagaggccccaagagggtcatggctgcccaagtgtgattctgggggtgctgagtgccgatgtcccctccggcccctgctcccccatccccatcctcttcccgcagcctgctgagggatgcccaagaagttccagggtgagaacaccaagtcggcagcggcccgggcacgtagggcagaggccaaggcggccgctgatgccaagaagcagaaggagctggaggatgcctactggaaggacgacgacaaacacgtcatgaggaaggagcagcgcaaggtgcgtgcactccgagtccccgcggcccgcatgccttgtggccaaggccagtggtcattatgtcaatgtgggtgaatagcgagagggccctctgagctttggtctgaaaggccaggagggaccaggcgctgtcgctcacgcctgtcatcccagtactttgggaggccgaggcaggcagatcacctggggtcaggagttcaagatcagcctggccaacatgatgaaaccctgtctctactaaaaatacaaaaattaactgcgtggtggcgcacacttacagtcccagctactctggaggctgaagcagaattgcttcaactgggaggcgcaggttgcagtgagccgaggtctccccgctgcactccagcatgggcaacagagcgagattccatctcaaaaaaaaaaaaaaaaaaaaaagaggctgggcagagtgcctcatacctgtaatcccagcactttgggaggccgaggtaggcatatcacctgaggtcaggagctcaagaccagcctggccaaaatggtgaaaccctgactctactcaaaatacaaaaattagccaggcatggtggcaggctcctgtaatcccagctactcgggaggctgaggcaggagaattgcttgaacccaggaggcggaggttgcaatgagctgagattgtgccgttgcactccaacctgggcaacagagtgagacactgtctcggaaaacaaaaagcaaaatgccaggaggcactggagatggcagaggggagggaggcagaggaaatggtgtgtggaaaggccctggggtggcacagtcttgcttgtctgtggacagtgaggctgtcattgctctctgtggatgtttctctcctttgagtaatgtcagggttgggctagatggtcattctcaccgtggagctactctgcccctgaggacgcttggcaacacctggagatgtgtttggttgtcataactcggggagagggggtgttgctggcatatagaaggtggagaccagagatgctgacactctagaatgcacaggacgcccccacagcaaagaatgagccagccccagatgtcagcagtgctgaggctgagaaacgctgtgatcaggcccccatttccaacctgttgacccaggtccacaggttcttctaggtgtttattttatttttgttgttgttgttgagacagagtctccctctgttgcccaggctggagtgcaatggcgcgatctcagttcaccgcaacctttgcctcctgggttcaagtgattctcctgcctcagcctcctgagtagctggaattacgggcatgtgccaccatgcccagctaattttgcatttttagtagagatggggtttctccaggttggtcaggctggtctcgaactcccaacctcaggtgatccgcctgccttggcctcccaaaatgctgagatcacagtcctgagccaatgtgcccggcccaggtgtttattttttaaaagccgtcgtttggcgtggtagctcatgcctgtaatctcagtactttgggaggctgaggtgagaggattgcttgaggccaggagctccaggccagcctgggcaacatagcaagaccccatctccacaaaacatgtacaaattagccatgcatggtagtgtgtgcctgtggtcccagctacttgggaggctgaggtgagaggatcacttgagcctgggagttcagggctgcagtaagctataatcgtgctactgtactccagcctgggcaacagaatgagactgtgactcaagatgaatcaaaaagcccagggccaagcaccatgcttcattggtgtctgggttgtggtttagggctgatgctgacctgcttggcccagtaggtggcgccagtgacccatgctagccacagctcctggtttccacaccctgggtagctgagacactggccctctaggcaaccccccagcttaggggctgctatcctgacaacatgcccagttcttggggggaatctggacattcccacctgttttacccgtcatcttttttttgtttttttaaagacggtcttgctctgtcacccagactggagtacagtggcaggatcacagctcaatgcagtcttgacttcccgaactcaagcaagcctcctgcctcagcctcccaagtagctgggactataggcgtgcaccaccacgcccagctattgtttgtattttgtgtagggggtgggggtcatctcactgtgttgcccaagttggtctcaaactcctgggctcaaacagtcctcccacctcagcctcccaaagtgctgggattacaggcatgagccactgcacctggcctcccattgtctttctgtgaaggggtagatcctgccttgtttttagcacacattcaatgtccctggctttcttccagccccacccctacccaccctgctgcactgggtccatggagatatttatagtttgggggttgggggatcatcaaaattttgacactataggaaagttgaaaactcaaaaggaaaaacaatgtctgtcaaagatgcagtatccatccgggtgcggtggctcacgcctgtcatcccaggactttgggaggccgaggcaggcggatcacctgaggtcaggagttcgagaccatcctggccaacatggtgaaaccccatctctgctaaaaataaaaaaattagctgggcgtggtggcgcgcacctgtagtcccagcaactcaggaggctgaggcacaagaatcacttgtacctgggaggtggaggttgcagtgagccgggatcgcgccactgcactccagtctgggtgacaaagcaagagtccatctcaaaaaaataataaaataaaacaaaaagatccagtatccagacagaatccagagacctttccgcccatagtgtcaagatcattggcttaatcctccctgtggcctgcgtcttggccactggggttggccccatcctctggatgaggaaattgaggcagagaaggcagaaagcccagatcacgtggctatgaggaagagctggagccagactggcaccttctcctttgttaagaggctttttttttttgaggcagagtttcactctgtcgcacaggctggagtgcagtggcgcgacctcggctcactgcaacctctgcctcccaagttcaaacaactctcctgcctcagcctcccgagtagctgggattacaggtgtgcgccaccatgccaggctaatttttgcatttttagtagagatggggtttcaccatgttggtcaggctggtctaaaactcctggccccaagtgatccttccacctcggcctcccaaagtgctgggattacaggtgtgagccaccgcacctggcctttttttttttttttttagacagtctctgttgcccaggctggagtacagtggcgtgatctcagttcactgcaacctccgcctcctaggtccaagcgattcttttgcttcagcctcccaagtagctgggattacaggcatggcaccatgcctggataatttttgtatttttagtagagatggggtttcaccatgttggccaggctggtctccaactccttacctcaagtgatccgcccacctcggcctcccaaagtgctggaattacatgcgtgagccaccgcctctggcctgttaagagatttgattaagggacagcaaagcatgcctgtcctaggagtgtgggtcagaaagcatgtacctctgagcacacctgtattgcatgcatccgggacaaggtatggagggggttggacaggcaattggggccaggtggtgaatagcttagacttcacttagggccagacaggaagccactagaccctatcattgagcatgaaggccaccactgacagtaggttagcaaataggtgtggctgcatgcccataaaactttaccaaaggggccgggcatggtggctcacacctgtaatcccaacactttgggaggtcaaggcaggtggattacaaggtcaggcgttcgagaccagcctggccaacatagtgaaaccccatttctactaaaaatacaaaatattagccgggcgtggtggcgggtgtgcgtaatcccagctattccggaggctgaggcaggagaatcggttgaacctgggaggcagaggttgcaccattgtactccagcctgggcgacagtgcaagattccacctaaaaaaaaaaaaaaaagggccgggcgcggtaactcattcctgtaatcccagcactttgggaggccgaggtgggcagatcacaaggtcaggagatcgagaccatcctggctaacacggtgaaaccccatctctactaaaaatacaaaaaatcagccgggcatggtggcaggcacctgtagtcccagctactcaggaggctgaggcaggagaatggcatgaacccgggaggaggagcttgcagtgagccgagatggcgccactgcactccatcctgggcgacagagcaaggttccgtctcgaaaaaacaaacgaacgaaaaaaacacaaaaaacctttaccaaagaaggcagttggctagttggctatagtttgtcaacccctgctctctagaatattctcagcccccgtgagtttccctcatacccctcctggtcagtcccccaccagtgatacctctcctcacttcaaacatcatgcattggccaggcacagtggctcacacctgtaatcccagcactttgggaggccaaggcaggcagatcacttgaggtcaggagttcgagaccagcctgggcaacatggtgaaaccccgtctctactaaaattacaaaagattagccaggcgtggtggtgggcacctgcagtcccagctatttgggaggctgaggcatgagaattgcttgaactcgggaggcagaggttgcagtgagccgagatcgcaccactgcactccagcctgggcgactgagagagactgtctcagaaaaaaaaaaaaaaaggaccctgtctgaggcagaatgtgtgtgtgacacgcatcggtcggggagcctcgggacgttgcctctgaccgagggggaaactaaggctcctcagcacagcaatgggagcccagtttgtgcactccaacagccttgactttaaccgccccctccactttcctgctgtgctggtgggggtgggggtcaggccctggcagtgtccttaggtgcgtccacccctattctgcgacattcccttctgtcaaatctatctggagatgcagtggtagtgtcccagggggacactgcaggtgtggggatcgtccctgggaaggctgaaggtgtgagagtcagatggtggagtctcaggcagtgagggggcaggcaggggtgtccgagaccagggccctgcaggagtgccaggcagtgggcagagtactgccctgagcttccagcagcactgcatataaaccgtgggcttgctcggccccctggggtccgtgcaggccagggcaagggcaagtcccgtagcccagatgtccctcatccagccagcatcagggcttccctgggcggccgatgtggaatcagtttcagcctcagtgacccacggcagggaaacgtggacagtgctgcccgactcataagggcagagcccctgccctagcctgaaacgggtccaggcctcccacggctcttagaatccaacatgaacccctccctggcccccagaggctccgcatggcccagccgtctccctcccggcctcttccccctcccgcttcactcccactccagcctccaagctgttcctgttacaacaaatggctcctgcctcggcgcctttgcactggtagccctgctgctaaggacgctcctgttccccagctctcccccttggccggcgctcttcgcacctaggagcgtcacttcttcaagagccacccacccgccctgtccaaggttcccctgttggcctcacatcccccgcccagggcagcaccgggacctatcttgttcctggtatgtcccctgcacccagcacagagcctaaatcctcgttggctgagatgaaaactcgaaccccaggctagtgggtggcgcgggggtgtggggtcttctgcctgaccatgcacgccgcccccgcaggaggagaaggagaagcggcgcctcgaccagctggaacgtaagaaggagacgcagcgcctactggaggaggaggactccaagctcaagggcggcaaggcgccgcgggtggccacgtccagcaaggtcacccgggcccagatcgaggacacgctgcgccgagaccatcagctcagggaggccccggacacaggtcgggcggcatcccgctctggagctgcacttttgcccactgcagaggcagtggaccttgagtccattagccccctcctggcccccagagaagctgccggggctccacgtggtgcagggtgggtgggtaggccgcctcctggtaggcctggccgtgagcagacaacctcagggcttgtgccccgcggggtcctcttgtttgcagggctgccggaaagtaaggcagagaactgggcgccgggagggtgggacctgtcccaagagggcttatcagctgaagtcgcgattccatcccccctcatctctcccgccttcctcccgcccctagcttctcttgccagtctctatctcatctccttggaactgtgcatctttgcttatctctctctgtctctgtcacccacccacccgcccagccgagaaagccaagagccatctggaggtgccgctggaggagaacgtgaaccgccgcgtgctggaggagggcagcgtggaggcgcgcaccatcgaggacgccattgcagtgctcaggtaacggggcggggcctggggctttcccaggggtggagctggtcatcgggggcggggctacctgggggcggggccgggcttttcggggcaaggctgcgcccaaggccccctgacgctcatgtccacccccagcgtggcggaggaggcggccgaccggcacccagaaagacgcatgcgggcagccttcacagcctttgaggaagcccagctgccgcggctcaaacaagagaaccccaacatgcggctgtcgcagctgaaacagctgctcaagaaggagtggctccgctctcctgacaaccccatgaaccagcgggccgtgcccttcaatgcccccaagtgagcccagaacttggggagccagttcacccacgggtggtccaggtcacgactctgcacgcccttaggccaggtcagctgcgagggtcacagagcgttccgggggccaaggcgccgggccccggggccatgctcttatcaccagccacccgtcctcccgccagagggtccctgccccgagtgacaccccatcccctcccatcccccggcgcgtgtgtgtagagcctcagggctgagtgcccaataaaggtggcggcaaggctgcggtgaggcacttgaagcctaagtgagtgggtggggagaggcgggcgaagaatggggagaaggaacagctttggggacctgctgtgaaccgcactgggatcatagctagaaaagacaagagcccccaacagcgcgctccttcctgctgccagctgtgcttcatcggctcctgccagcacccctccttggctgtgccacttgtccagtgaggcacctgctccactgtctcctgcacacgcttagagaggtggaggtggaggcgctggccatacttcagaggcagagccagagaagagctggagcctgtctgccttctgagattccagttcagggtgggccctaggacttgattgggggtaccatgttgtgtttggggtcaggaaatgctggctgctctgctgttattcctacaggggaggcatctgggccaaatccttctgtgctgaatcctgggcaggcttcccagtggaggatttcttccttagtgggggatgagtcagatctcattgcagagggaggaggaaggcactgggctgggaaaggcctggaggctgcagtgagcaggtggatcggagtgggtgtgagcaagcgtcccgtcagagactgcacatctgggaagggtggagtgggatttgaacctagttctggcttcctagaacttagccagcccggaagaatagaggaagggcagctgggagatgggcctgtgaggctttgtgggctgagcaaattgcttggactcatgagggcggcaggggatggaggtgcccccagaagctgcagtggtcagggccgggtgcggtggctcattcctgtaatcccagcactttgggaggccaaggtgggcggatcacctaaggtcaggagttcgagacaagcctggccaacatggtgaaaccccgtctctactaaaaatacaaaaattagctgggtgtggtgacgcatgcttataatcccagctactggggaggctgaagcactagaaccgcttgaacccaggaggcagaggctgcagagagtcaagatcacagcactgcactccaacctgggcaacagagcaagactggcaacaacaacaaaaaaagttgcagtggtcagatcatctgcagcacttacccagtgggctcgggtagaggttggagcagcccctggtgcaagaaatggccatcaagtccccactgtgtgcctggccttggacagccctgctgtccaaggtcatccataacagtggggggaactgaggcacaagggtagagggtagggttgaaggacttaccaggccactgctgtggctcttgcccaggtgacacccacttcctatgcccatagggctgtcccctgactccccattaccctctcagctcagtacttccagcctccttactcttggcttctgagaccctccaacacagaaggcttgatccctccaccaagaacaccgtcctgctgggtgcggtggctcaggcctgtaatcccagcactttgggaggccaaggcgggtgggtcacctgagctcaggagttcgacactagcctgggaaacatggtgaaaccctatctccactaaaaatacaaaaagttagacgggcatggcggcaagtgcctgtagtcccagctactcgggaggttgaggcaggagaatcgcttgaacctgggagttggaggttgcagtgagccactgaactccagcctgggcaacagagcgagactccatctcaaaaaaaaaaaaaaaaaaatcactgtcctcccagatcacaaggcttagtgcatgcaggtccccacagaggtcctcagctctgtgtagtcagggctggagggctgggcaggctggaaggggctaggctctgcccagaggtgggagatagaatgtatcatggaggacgggactttcaggatgcataggagctctccacacagacaagggacagaaaagtcgaagaaatcacatgtgcaaaggtctggaagtcacactgcttcctgttcaacggagggtaaaaggtgccaggaataactaggtacaggtgaggcacggtggctcacacctatctataatcgcaggactttgggaggccacagtggaaggatcttttgaattcagcagtttgagaccagcctgggcaagaaagcaagactttgtctctacagaaaaagtttaaaattagggcgtgatggcatgtgcctgtggtcccaccttctttggaggccgaggtgggagaatcccttgaggttgagttagaggttgcagtgaggaggttgcagtgagccataactgtgccactgcactgcagcctgggcgacggagcgagaccccgtctctaaaaaataaactgggtacagctgaagttaacataaaaactaaccaacatatgttggacactagcttagtttggaggtcccccaagaaccaaccctgagacaatgactgtaggaaacgtgggatatctgggagagacctttggtgagggttagggaaaggagaggaaggtaaggccccctgcatcctgcagggggcaccaacgagcagagtcccccacgtgggaggagacaggcagtggcaccactgggtgccaggccttggccaaacaggtggcagcagcccctcactgagccctggggacagcccctatgagatattgatcgtctttgtatataagaaaactaaggctgggcacagtggctcacgcctgtaatcccaacactttgggaggcccaggtgggtggatcacctgaggtcgggagttcgagaccggcctgaccaacatggagaaaccccgtctctactaaaaatacaaaattagccaggcgtggtggtgcatgcctgtaatcccagctactcgggagcctgaggcaggagaatcgcttgaacccgggaggcggaggttgcagtgagccgagttcatgccactgtactccagcctgggcgacagagagagattccatctaaaaaaaaaagccgggcgtggtggcgggcgtctgtgatcccagctactctggaggctgaggcaggagagtcgcttgaacccgggaggcagagtgagccgaggccacaccatcgcactccagcctgggcaaggagagcaaaactctgtctcaaaaaaaaaaaaaaaaaaaggaaaagagaaagaaaactaagtcacctgcctgtgtcacatagccgggaagcacccagagccgccaggaaggcagcaggggtagttttggggcccagaattggggctgaagatgtcagccaggaaatgaatggaatagcccatatagctccccacaaatggaggcctgggtttgaatcccacctctgactcttctgagaccttagacaaggttctgaatgatctaagcctcagtttctccggtaaaataggactaaaaaccgcgcccaaccccaggctatctggagaatcaaggagatggtacctgggaagggtacgtggggaagggcttggcccacatgaccatattagggtctttctggctggggatgagagaaggtcggggaccaatggtaatcgatccgagggaagaagccgacgggagggccagccagacacgactgggcacacagggcctcggacgccaggcaaaggagtggggcttcaccccaggacgatggggagccccggtggggttatgagcagggcagagagccgatcagagcggcgcgtggcaggctcttccgggcgcctgcagagggacaactggtggacaagagtgaggatgaaactcaggacaggagctgagagggtggtcgtcagccctcgggcacaaagacaaggtgatgacgtttgttccctgttacagaaaggcccttactcccttcggctcctagccccggccccggccccggccccgcccccacccccgcccccgcggaatcccaggctcgcgcgtgcgcactggcagcagggaatccccagctccgccgcagagagcgggagggggcgtgagaggggagttccgtgcgcgcccagccggccccgcgtgcgttgccaggacgaccgggcggggccgcggggccgccggtcgctcactgcgcctgcgcgggggtgctcgccatttgcgccggggctttcccgtcgcgcgccagcagaagaggggatgccgcgcccagcgcgcatgcgtcggccccacccgacaccccccgccccccgcccccaacccacccaccctgagggccggggaatcctcacccgccgcagtgcgcatgggggcggggcggggaaaccggttcaaaccggagtggggtttgccgaggaggtggcgggggagggagcgagagcggggtcttcccgaggttcccactccggcccccgccgttgccttagcaaccgggcgcgcgggccgcagtgcgcgggcggcggcggcctcggggaagccgggtggctctgcgcctgcgcggggctccgcgcctgcagccggggttccccctcgagcaccggggggacggcgggggagtagaggatgggcgcgggggagcgggtgctggggaggaagagaccgtgggggaagagacggcgcgggaggaaagaaggggaggaggggtgggtgccgaggagggggcggtgggggaaaacgcaatgggtagggactgtagggaggggtgcagggagaggcgagcctggggatgcgcgccagggagggggtgacgggggagagcgtagagggagggggacgacaaaggcggagggggatgggagggggagcttagggagtagagaagggatatggacaaggagaggggtacactgggccagtgggggcgatgggagggggagctgggggacaccttaggcacctgcagtctcccgcccagcagattggtctgcgagggtgggggttgctgtgccagaaagtcaggatcttcgagtccgagcttaaggtttccagatttagaaaaaaaaaataaaaaaacagggcgcccacttaaacttgactttcagataaacgagcaattttttattataagtatgtcccattccgtgtcctctactttatcccgcagccctaatctgggctattgtcgttcccccccaccccccaatttacacaccatctgtccctatccttttcgaaagctgtgcggaccctcgcggaagacgcctttgtctcccgcctgcctagcgccccacagcccggcatgtggggtgtacccccgggccccgtcatcccctcccccagccatctgccgtcctcctggccttgaacaacagcctgaagtcgagtccgggctaggcaggggaaagcgcaaaggtgcagcacgcaccctcggggattttctcagcgctcctcaccccccacgacctccaaaccctccgctatgggcctggccctgccaaggccacatcgccccgcgggtcccagacacccgcaccttctccttctccaggaacctccagggctctgctttcgggcagcctccctcactctctgggcacaaaagcacacaggcacgtagtaggtgctcatgaaaaaaaacatttgagggtgattttagggaggcaagtgcaggtgagggagtgttgcatttctcgacacggacaactgcgtcctcatcccatggggacatataccctctctgggcctttgtcccctccaacaaagcaatttcccttttatccttccctttggtttcaaaaagtgtaagataacaaaacactttgttttgttatcaaaacacaatcaaaggggggaaaggtcagccccccaggggtccctggccctgggctgcccccagcgtctcccccaacacttccccaacttgccacgttcgcttcttttacttattcgccatcggaacggtggaacatttgcgcctccggcctggcttctgctcaaccggccaggagctcggtccctgcggatcattttccccaggggcatattattccggaaacgggctaagcggtcccgggttggggacacgtcggctcctgtgtttttagtttcgctggcctaggtgacccccctgcagaagacggctgtggatctgctgtgccgtgtcttggaggcatttctagggcggctagctgggcaaagggtggtgctgtccctttatttggagctaggtagctcctggggtggtgctgggtcgggagcggccctctcctcccatcagctaggaccaagttgcacctggcccctcattcccaggggcggagagaggagaagatgaaagagcaagcaagttcacaccagggcttgagggcagtgagaacagtaaaccagggcgacgtgcccagagaaggggcgactctagggaagaggcgaccttggatggagccctgaagagccctgtgggaacagggggtgaggagagccagggaagggcgatcccggcccaagaaaccgcagatgcaaaggctctgaggctgaaccggttagggggagaagctgggcgtgtccagaatgtggtgggcggtccagggagaccgcggagggattggaacaaagggtgggcgttgtggggggcagaccgcgtcggcctgtgaggagtcagggtgctcctcttggttcaagaagagaagggaggtggggggagggcggtcatgcgggacagggacgtgacctgtcacacgggtgaggactgaagtctgtggctgcgtcagggagaaggactgtggcggggacaggaggagccgcgggagtggggaggattttcgggctccactgggcgattgtggggtccacggggcgtgggggaatcccctgatcatgggtgtccttgtcacttctgcagcctgactctccttcactgtgtctgactaaagcatgggtcgcagccttccccaacaggggcgggaagtcccccccggggagggtgttgggtggcaccccttgtcctcggctcctgcgaacccaccggctctctgcctccacagtgcagacccgaaggcctcctcccctttgttctttttccctccacacggtcacggtcacaccggcggctccctctgagcgcatctcacacacaatgggggtggggggtgcgctcccagtttcccctcctctcagtatcggcgtccccgagccccgcccgcgccacggaatcccggcctccagaccccgcccgggaagctcgttacctttccagagaggctccccgccggggggctggggaggggggagggctatttttagaatgaatggaagaaaagagaggaaaaaaaacaaaaaacaaaaaccagaatggaggtttgtagaagcctccctgcttccaagaggaacccccctccctgtcccctgcctgaaggtggctgaaggtccccaccaaggctgaaggtgggtgggggttcagagacggggcggagcaggggacttcgaggaggaacacggtggtctgagctggagccacgctttctgttggagggggcagctgaaggagaacagcaagacatatccggcggccctacggactcggagagctggagggaccccggaggtgggcacttgtccgttcgctgaagggaaactgaggctcagaaaggggcttggcagggccgaggtcacggaaagggcttgcccctggacttctccctcccatcccctaccgagccagaccccgcgagccacattgttctaaggtggcagagtgaccttcacaactctgccacccaagcccgggccagtcaggctcaagaggttcctaatcgcgcaggttggggggagggtgtcaccagcccaacaatgaaatagagaagttttctgtggtttggttctggccacccaggctcccccttcctagctgggaccttccagcccggtcaacgtcgccagctgcccgaagcctctgggtcccccgatcctccccagtggcgtggtggggaggctttaattgtctgccttcctctctccctgactctcttctttcccggagctgagagagcggccccccagagtgaggggagcagccctgttccgtgctgctgggacactgggccctggccaggggcttccgctctccgggcctcagtttccccgtctgtaagatgagcaccttgggccagaggcggcagagggtcctcccatctctttgaccgtcttctaagatttgctgtcacgcccctgggtggaggggggagagtgggctttggcgagagacctggagggggattccatccctgctttagaggagacgccttgcgggggggagggccccggctgtggccgcgacggactgcctccctcggcctgcggggtccgcgccccctccccgggcggcggggcggggcccaggtcggcggggagggggtcggctctgcggcggcgcgcgcacaccctcccggctcacacgcccttgcccggccgtgcacttgtcttcgcgctcgggcagggcgcagggactccggctgcggcggccgactccggccggtgagtggcagtggggggcacggcggggagcgttcggtcccggcggcggtccccttctctttggtgggcggattggtcaaagcttgcccgactccgggaattcaaaggggagctgcgggaggagggggacatcccttcttcaacccccgcctccaacaccgatcccgggagtcagctcctgaccccacccccatgccctgtgaggagggggttcctgcttccaggtctggggaagcgcagacatccccctccctccgcgaggtgaaggtggggacatggggatcctccacgcctgcaccctcctcagtggtggggggaaagcaccgctggttcccgttgccccctcctccctctctgtcccctcaggtttctccctttctccttgcgttgtggcggggattccctgtgctggccaggctgcgcagtaggagggaaccccccacctgccagcctactgtgcgctgggctccgggttcctgttcttttccctaagctccctcccttcccccctcccctctcccggacaggaggaggggctgaggcccagagagggttaccactcgcccaaggtcacccagctgggctggggcagagcaggtttctggtcagatccacgaatcccgggacccagctggggaggtcagctttgggatcctctgcccccgccgccgtttaaccctgagcgtgggttgccagggccccagaactggggggattccttactttctccaagtttctcctctggctagagacccagacaggactgagccaagaagccccggcctcgctctcttccggggctcccagatctcacctcctcttgtcccccgtgtgcccccgctcccagcctcctcaggctgcccaagacctcatcaaaggaaatccctggggggagggggcttatagatggggaagtcaaagcttctggagccacggaggagataatttttactccgacgcagcaacccgctgagtgaccttggacaaggccctgccctcccaaggctagggtcagcaccaagtccccctggctggaacaggtggcccctgagccatccaaggtgaccattgccccgatcccaggtcctggtgagagaaagggcagctgggggtttccccttcagtcctgttctggggtctggcattgcccctgccctccatggggtgtccttttctgccctcttctccaggatcggacttgggtaccatgtgcttctataagccctctgcagacagcactaaatagatggagggagcacgccaagggagctacaggctcccagggcagcttcagagctggggagcaagagttcagctgctctgccaagcgaggtggttcacaactgtaatcccaacactttggaagggcgaggcaagctcaggagttcgagaccagcctgggcaacgtactgaaaccctgtctctacaaaaaattaaaaaaattagccaggtgtagtggtgcacacttgtagtccaagctacttgggggccgaaggtgggaggatcgcttgagcccgggaagtcaaggctgcagtgagccatgttcatgcgactgcactccagcctgggtgacaaaatgtcacctccctgaatgtcacccacctagatctccccatggcgaaggaactaggggcaatgtgagggggtgagcaggaacagcattgggaaagacagataaagcattcagtgtctagcttctggagcccagtgaaaggaggagtggccttagggaggggacatggaagaggtggggctagcccagggccccattggagtgataaagccactgttcttaagcttcctgaaagcttaggagatgacccagctcagcaacaccaagccagagcgcagatctgctgtaaagaccattgtacgtaataggctgaagcaggtgaatcacctctggccaggagttcaagtccagcctggccaacacagcaaaaccccatctctactaaaaatacaaaaagtagccgggcatggtggcaggcacctgtaatcccagatgcttgggaggctgaggcaggagaattgtttgaaccctggaggcggcagttgcagtgagctgagatcacatcactacactccagcctgggtgacagagcaagactctgtctcaaaaaaataaaaaataagaaagaccactgtagtccgggagctgtctgcaccctactcttttgggtccccgcctccaccccgcaccccctgtctgatcattacagatctcaaagggacaggaaaggcagcagcagccaccctctctcccagtcaagtggtcaccagcaggactgaaggggacagcccctttgcagtggctcggcgaggagacccctgcaccctagggtgagtgaatcccagacttgggtcgcctttgggggtgggggtggctcaggggttggatagaaaaattggtaactgggcaggctaggtggctcacgcctgtaatcccagcactttgggaggctgaggcaggtggatcacttgaggtcaggagtttgaggccagtttggccgacatggcgaaaccccgtgtctactaaaaatacaaaaattgcccggggatggtggtgggcacctgcaatcctagctacttgggaggctgaggcaggaggaccacttgaatccgggaggcagaggttgcagtgagccaagatcgcgccactgcactccagcctgggcgacagagcaaagctctgtttcaaaaaaaaaaaaaaaaaggtgacctgaggaaaaagtgccagcttttgaaataataacaagctgggtacagtggcgtgcacctgtggtcctagctactcggaaggctaaggtgggagtatcgagtccaggagttcgaggctgcagtgagctatgatcacgcttgtgaatggccactgcactccagcctaggcgacagagcgagacccccatctctttaattaaaaaaaaaaaaaagaaaaaaggccagacgtggtggcttacgcttgtaatcccagcactttgggaggccaaggcaggcagatcacctgaggtcaggagttcgagaccagcctggccaacagggtgaaacccccatctctactaaaaatacaaaattagccaggcatggtgctgcatgcctgtaatcccagctacttgggaggctaaggcaggagaatcacttgaacccaggaggcggaagttgcagtgagccgagattgtgccattgcactccagcctgggcaacaagagtgaaactccatctccaaaaaaaaaaaaaaaaagaaagaaagaaaaaaaataataatataattattattatatcatatatatcatgatgatgatagcaaggactatgctttctagagcctccggggagttactgtccactttctttgatcactggagttggggaaactattcagagaggccagatgacctagaagtggggtgttgagccaggttggaagagctctgtcccaccactcccgcccccgccccccacacacagcctctacttcccggctctcgtggtctcgctggagacagcccccagggtaggccagctctgtggaaggcagctcctgtgctcctttctccagtgaactttttttttttagttttgttttgttttgttttgtttgtttgttttgagacagagtctgactctgtcgcccaggctggagcgcagtggcatgatcttggctcactgcaacctccaccctccaccccaccgggttcaagcgattctcctgcttcagcctcccaagtagctgggattacaggcatgcgtcaccacgcacagctaatttttgtgttttcagtagagatggggtttccccatgttggccgggctggtctcgaactcctgacctcaggtgatccacctgtcttggcctcccaaagtgctgggattgcaggcgtgagccactgagccaggcctccttggtgaacactgactgacatccagggtcagcactaagctgcccatgggggtgtggagaaaacagaggtggtggtcatttagtcaatcaacaaacactgagcaagctagctactgtctgccaggccctaggctggatgctgggatgcaataaggacaaaggccagcccaggtcagcccttgtggaatttcatggggcatcaattaagcttaagtgttttgtgctggatacagtggctgatgcctgtgatcccagaactttgggaggccaagacaggaggatcacttgagctcaggagcttgagaccagcctgggcaatgtagcaagaacccatctctacaatttttttttttttaaattaaccagtggggtggtgcatgtgtgtggtcccagctactctggaggctgagatggggggatcacttgagcccaagaggtcgaggatacagtgggctatgattgaaccactgtactgtagtctgggtgacagtgagactctgtctcagaaagaaagcgagaaagagagaaagggggccaggtgtggtggctcatgcctgtaatcccagcactttgggaggccgaggtgggcggataatgaggtctggggatagagaccatcctgcatggtgaaaccccgtctctactaaatacaaaaaattagccaggggtgatgtcgggagtgcctgtaatcctagctactcaggaggctgaggcaggcaggagaatcgcttgaaccagggagttggaggttgcagtgagccgaaattgcagcactgcactccagcctggcgacaaagcgagactgtctcaaaaaacaaaacaaaacaaaacaaaaaaacaaaaaacagagaaagggagggagggagggacagagggagggaggaaggaaggaaggaaaggatggagggagagagagaaaaaaaggagaggagaggggaggagaggagaggggaggagaggggaggagaggagaggggaggggaggggaggggatggtggggaaggggaaagggaaagggaaaggggaaagggaaagggagaagagagagagggagggtaggagggagggagagagaaaaaaagaaggaaggaaagaaggaaggaagaaaagaaagaagaaagaggaagggagggagggaaggaagaaaattgttttgtattaggaagaaaatagaatatgaggatgtattagtgaccagaggagcagggaagcctcttgtaaaagtcagagaggcctctctagggcagtgatcatgagctgagacttgaaggaagaggaggaactggcctgctgacagctgggggaacagcatacccagcagagggaaccacatgtgcaaaggtcctgaggtgggaatgagcttggcgtgtttgaggaacagtgaggaggctgctgtggctggaacagagtgagtgggagagaggaggaagatgaaggcaagatcggcaggtaggagccaagctacaaggaactcagcggctgcagtgagggtgtggacttcagagcaatggggaaccatggcaggtgtgtgagcaggggagaggcatggtctcagttaggattttcagaagccctgtggctgctgtggagagcagggcaggagtggaggtggcaggagcccagagtggaggcccaggagatgtctggtggtttcagctgggttggtaccagggtagagcctcagatggaaaaaagtgggcacattctgggactgggttggggatggaggatgaaatgtggccaggtttccatctcatgccaagtagctactgtgagagaagggagcactcattgtgcttggggaaacctgggaaggcatcctggaggaggtgctctttgggctgagcctggaaggtcaagtagaagcttgccagcagataaggctggggtcatgtgggatctaactgctcaaatgccaggggatcactgagcacccagaatctggggcagtataatcagatttgtaaccaagaaagatccctgtaatcccagcactttgggaggccaaggtatgaggatcacttgaggacaggagttcaagaacagcctcagcaacatggcaagaccccatctctacaaaaggaaaaaaaatagctaggcatggtagcacacacgtagccccagctactcaggaggctgaggtgggaggatcacttgaggacaggagatcgaggctgcagtgagctctgactgcaccactgcactccaaactgctgcgagacaacaggagaccctgtctctttttttttttttttttttttttgatacagggtctcactctgtcatccaggctacagtgcagtgatgcaatctcagctcactgcaacctccacctcccaggctcaagtgattctcgtgccttaacctcctgggtagcttgggactatagataggtgcctgccaccgtgcccggctaatttttattttatttatttatattttcaattgtatttatttatttatttatttatttatgagacggagtcttgcctcgtcgcccaggctggagtgcagtggcgcgatctcggctcactgcaagttctgcctcccaggttcacgccactctcctgcctcagcctcccgagtagctgggactacaggcgcccgccaccacgcctggctaatttttttttgtatttttagtagagacggggtttcaccgtgttaaccaggatggtctcgatatcctgacttcgtgatccacccgcctcggcctcctaaagtgctgggattacaggcgtgagccaccacgtccagccctatttatttatttatttatttatttatttattttggagacggagtcttgctctgtcgcccaggctggagtgcaatgacgtgatctcggctcactacaacctctgcttcccaggttcaagcgattctcctgcctcctgcgtcagcctcccgagtagctgggattatacgcgtgcgccaccacacccagctaattttttgtatttttagtagagacggggtttcaccatgttggccacgctggtcttgttttttgttttgttttgttttgttttttttgagacagagtctcgctctgtcgcccaggctggaatgcaatggtgcgttctcagctcactgcaacctccgcctcctaggttcaagtgattctctgcctcaggctcctgagtagctgggattacaggcacctgccaccacgcctggctaatttttgtatttttaatagagacggggtttcaccatgttggccaggctggtcttgaactcctgacctcatgatccacccacctcggcctcccaaagtgctgggattacaggtgtgagccaccgcacccggttatattttttcaatttattctttattttagtagagacagggtttcatcatgttgcccaggctggtcttgaatccctgagctcaggcaatcagcccaacttggcttcccaaagtgctaggattacaggcatgagccatgggaccctgtctcttaaaaataaaaaaatgattccctctaggtggggggctctgggggaggttacacccgagtgaaagagttcaagaggtgcttttgaaatagtccaggtcagctggacgcggtggctcaggcctataatcctagcactttgggaggctgaggtgggcggatcacgaggtcgggagtttgagaccagcctggccatcatggtgaaaccccgtctctactaaaaatacaaaaattagccgagcgtgatggtgggcacctgtaatcccagctactcaggaggctgagacaggagaatcacttgaacccaggaggtggaggttgcagtaagcggagactgtgccactgcactccagcctgggcaacagagtgagactccatctcaaaaaaactaaaccaaacaaaaaaacaaaaaaaaaaaagaaaaagaaatagttcaggtaatggtcaggccagttgcagctgtaagcattcatggagcactagtgctgaacctcatgccactggcctccaatgaggccatatcattgccttgcagaggaaatggaggcctagagttacaagtcccttgtccacaatcactgccttcattcctgtggctgccaccacaaatgaccatgagctggatgacttacaaccacacaaagttggccaggcggggtggctcacggctgtaatcctagcactttgggaggccgaggcgggtggatcacctgaggtcaggagttcgagaccagcctggccaacatggtgaaaccctgtctttactaaagatacaaaaattagccaggcgtggtggtgggtgcctataatcccagctactcgggaggctgaggcaggagaatcgcttgaacgtgggaggcggaggttgcagagagccaggatctcaccactgcactccagcctgggtgacaggagcgaaactctgtctcaaaaaaaagaaaagaaaagaaaagaaaaacacacaaaaagttgtgctgtcacagttctagaggccagaagtccaaaatcaaggtgttggtggtgttgccttccctccggaggctctcaggaggatcctttcctgcctcttccagcctctggtggctcctggtgttctttggctgtgtcacccccacctctgtctctgttttcacatgaccttctccctgtttgtccatctgtatcctcatatgggcttcgtattaaaaaaaacagttgttagatcagagcccaccctaatctaccatgagcccctcttcattgggtgggccaaagcaggtagatcacttgaggccaggagttggagaccaacctggtcaacatggtgaaaccccgtctctattaaaaatataaaaattagccggctgtggtggtgcgcgtctgtaatctcagctactcaggaggctgaggcaggagaattgcgtgaacccaggaggcggaggttgcagtgagccgagatcacaccactgcactccagcctgggcaacagagtgagactctgactcaaaaaaaaaaaaaaaaaaaaacccagaaaccagttattagatcagagccagaactaacccactatgaccccctcttcatttaactacatctgcaaaaaccttgtttccaggccaggcacagtggttcacgcttataatcccagcactttgggaggctgagatgggagcctcacttgagcccaggaatatgagagcagcctgggcaacataatgagacctcgtctctacatttaaaaacaaaaagaaaagaaaaagaaacaggagaatctcttaagcccaagagatagaggctgcaatgggcgtgatcgtgccactgcactccagtgtgggtgagagagtgagacccagcttcaaaaacaaaagaaacaaaaccctattttctttctttctttctttctttctttttttttttttgagacggagtcttgctttgttgcccaggctggagtgcaatggcacaatcttggctcactgcaacctctgcctcccaggttcaagcagttctcctgcctcagcaccccctagtagctgagattacaggcgcgtgctaccatgctcagctaagttttatatttttagtagaaacagggtttcaccatattggctaggctggtcctggtctctaattcctgacctcaggtgatccacccgcctcggcctcccaaagtgctgggattacaggcatgagccactgagcctggccaaaaaaacccctattttcaaataaggtccaaggttctggggaggactcaaattttggggggtcacgattcaaaccagtccacctgcgtagcaagacattggggtttggagtcaaacctttgctcctctatggagctgccacagtggggagagaggggttccctggagcaaatttatgggatcggttggacccactggatgtgggggtggtaaaggaaggaggctagagccttctagcctgagcgtgaggagggaggggcgctcatgtctgaatggacaggatgggacagtcccagggtggggccgctggtgggcatgacaggggctccctgacagccttggatgctttttggggactccttgcttatgatggagctgctaccctgcctgcctgtcacgcccaggctcccacttcctgctctagggctgagaacacagcaggcagcccatggggagaaccgggaaggatcaggcccagtccctcccctcccatcctgtgcccctttttcctccgtgttctgtctgcagggcccttgtgtatttatcatatcaaagccggtcttgtcttctggcctgaaactgggagtctgggggactttgtgtgtctttaccaccacagtgtccctgccttagagtacaagtcctgcacacaggaggtgctcagtagatgctgatggaaggaatcccaggtccctgaatcccgagagctcaggaacaagccctctgcgacacctgccccagctcccaccctggtattcccactccgcttcctgcccctgcagttcccaggagcccgagggagccaacactccagatcttgttttttttttttctttttgagatggtgtcttgcactgtcacccaggctggagtgcagtggcgtgacctcggctcactgcaacctctgccttctgggttcaagcgatcttctgcctcagcctcccgagtaggtgggattacagcgccaccacgcctggctaattttttgtatttttagtagagatggggtttcactatgttggccaggctggtcttgaactcctgacctcatgatccgcctgtcttggcctcccaaagtgctgggattacaggcgtgagccaccacgcccaggctttttttttttttttttttttttgagacggagtcttgctctgtcaagcccaggctggagtgcagtggcgcgatctcggttcactgcaagctccgcctcctgggttcacgccattctcctgcctcagccgccagagtagttgggattacaggcgcccgccaccacgccacacccggctaagttttttgtatttttagtaaagacggggtttcaccgtgttagccaggatggtctcgatctcctgacctcgtgatccgcctgcctcagcctcccaaagtgctgagattgcaggagtgagccactgcacccggccacctttttttttttttttgagatagagtctcactctgtcgcccaggctgtagtgcagtggcacagtcttggctcactgcaacctccacctcccaagttcaagcgattctcctgcctctcagcctcccaagtagctgggattacagttgcccaccaacacacccggctaattttttgtatttttggtagagacagggttttgccatgttggccaggttggtctcgaactcctgacctcaggtgatctgccctctttgtcctcccgaagtgctgagattataggcatgagccaccacacccagctcaaatgatttctcttctaagagacttccctgaccaccctaactcaagtctccctgtcctcgttcttagttctttcaacttttttggatctcttcctgatacttctgatacttttttttttttttttgtgagatagggtcttgctttgttgcccaggctggagggcagaggcatgatcacagctcactgtggtctccacctcctgggctcgagcgatcttcctgcctcagccgcccgaaggagctgggactacgggcacatggctccacgcctagctaatttttaaaaaatttttgtagagacagggtctcgctatgttgcctaggctggacagtacttttgtgtatctaaaattctcagttttatttccctctttggagagggttgtccccctcttctagaaagccagcttcaagaggggcacggtttgtatctctctagggtgctgcattccccagcaccaggctcagagaaggggctatgtggatatgtgaatgaatgaatgaattagtgaatgaatgaatgaatcagtgaataaataaatggctgaatgagtgaatatcttacccttgccatcctgacactcactggggcccaggttccagcttccatccgggcagtccgggctgggtccaagatttcagtggatgcacctgtggaggggtgctggggatggaggtgtagggagatgctcgtgtggccaggccactccctgctccggccactacctttgtgtccctgagctcctgtgaacgtcttccagttctcttgcacccagacccttagacactgcccagagaccagaggcccagccctcaggccccctgcggaggggcttgctctccagccgcctccaccatgcttgacgtttgcagaggacacagcctgtgcgcaaggcagtttcccagggcatgagtcccgggggcgtcttggctgcctgacaggctcacttgcaggcttcttgggtctcttccagccaaccatgggctgatgagaggctctgcctggaacggagacccagacagcccccaccagaagtcccacctccatccaaccttgactcccattcatgctgccaaccttgtctctgaggggtgggattccagcaggtggcaggactgactcaggtgggaggcaaggccgttgatcaccagattgattgtccaagttccacttcttgatgggggcagtccccgatccctcagggcaggtgaatgcaaaggagaacaagcacaggtcttttcagagggagaaggtgggtacaggggcttcagggcgtgggcaggggtgcaggggattgggggcagtggagtgctgtggctgatgtttttgtgaatttcgggacagttacatgttagacttgaattcaaaaagcatctggccaggcgcggtggctcacgcctgtaatcccagcactttgggagtggatcgcttgaggttaggagttcgagaccagcctggccaacatggtgaaaccccgtctctactaaaattacaaaaattagccaggtttggtggtgcacgcctgtaatcccagctacattggaaggcggaggcatgagaattgcttgaacccaggaggtggaggtttagaggttgcaatgagtggagatcgtgctgctgcactccagcctgggcgacaaagtgagactctgtctcaaaaaaaaaaaaagaaagaaaaaagcatctgatgctacagcctgtgcaagcagaccagggtcagcccgtgggcatggtatgcttctcgtggctcagggactcctgcaagggctgggttgagctgtcaggggccaggagcattgaatgtggttcagggatgtgcccaatcctgagggagctgtgggtggctccaatgttgtgctttagaaaggggggctcctggtggtccaggcaggggaacagcaagtgcaaaggcctggaggtgggaactgtggcgaggggagactgagaaggcttggctggaggttggagtgctggtgagtcagtggagagatgcaagaggggtggctggttctcaggtgtggctgaaaacccgccccttcggagtccccacaacccctttcttgctctgcagtgactctcaaagctgcttgtgtctggtcagatcactcgtaacagccccctgttacagatcctatccaaccccgcctggtacctctgtggatctgaccgggaccacccaggcctctatttcctgattgtctcagccctgggcattgtcaccacggccgggccttgtgcagagcagtctggacaggctgggatgaggaacgggctctccaggggagggaacaaaggtcctgtctgagactctgagccatcacctggcccctctgtgactcaccgccaccctcagcccatgcagctatccctcattcatgcctgcctgcctgcctgcctgcctgcctgccttccttccttccttccttccttccttccttccttccttccttccttccttccttccttcagtccaactgttttctgagctccgcagaggaaacacagaagacagcctccctcaggaataaacactcagatgttcctgacctgggccaaagctctgggctgggaagaaaacagatggagggtgtgggagagagataggaggtgggatctgctggctccaggaagcccccaggctggtgggggacagagctgaacacagtcaccccaagcctggtgggaacagggtgaggcagaggcagaggcagtaagactggaagaggaggaaggaagagctccctacccactggtccccaaagctccctggagccgccattaactttgaatgaatgagtcggccaagttcagcctgggtgctgggggaaggagcacagttttggggacccccagccctggtgatcccaaactccctggggctctggcttcctgtcatcctggaaatgggtgttggaggttaggactgggtggcctgatccagacgggcgtctctcctcccacagaaggtggcctctaaccgagtgccccagcatgtacccagtcccacccctggaaggccctacacctggctcccagacaccccccaacttgcaatcaccctagtccccctcaaggctcccctatgcagagctagaccccggaggaggtcgtttgaggggcaggcattgagttgctttgcaaagttgtctttcagctgatgcttacggggaggacagtccccaggcgtgcaaaggttgacagagcggctgaagtttgggacctaattttggggagggggtatagttaggaggtccggagggctgttgggggcgggggttggagcttcaccaaggtccttcccgtcttatggggcaagagggggagttcgaagaccagccgcatgccggggggttgcagggggcgccggggaatgtgggatctttaaatatgggcggggcttgcggggtcgtcgaaggcggtgccaacccgggctcggccaatcggcggcggctcccgcgtcgcaccgcccccttctctcccggcccgggcgggcgctcgccccccgccgggcccgtggactgggcggcgggggatgcgcctgccgccgccgcccccggccccgccgcccccgggccccgcgcccgctcgctgctgcccgccccgtccgcgaccccggctccggctcccgactgggggtccgcggccgcgcgggaccctctcccctccagccttgtccgcccgctcgggccgagccccgcaggtacagggtgggatgggtgagggtgcgggaggatccaggatctgcagctcagggagcccgaggagggaggcacgtctcggagggggacgcggtttggggcaggggccaagagggagggtctccgtgcggtccggagcctaggagacacaggaaaggtggggggaatgaatgcatgtacattgcccgagtgagtgaggatccacgcacccccatcctgggagggggagggtgcagggttcactttgggggagggcagagctgtgagtctccaaactgcatagatagggttggaggtcggggagctctcagggatggacagtgacccgcaatgacttgggaatgggagggaggtgacccaccactggcccctggatccaggggttggggcactcagggaggggtcaggaaaccgggtcttccatctctccccggacagaagtcccggacccagctcggggcactgcccctgctgttctggagggctggccagcagatgggagttcccgaggctggggtctgagcggtgaggctgatggagatgcatcagaatggagggcccccgagggaggcagcctccaggagagcaggctaattgcaccctgctggctgctggcaggctcctggcgggtggtgatggggggatcgggcgggtagccagcgccttgctgcactggctcctgggcggcccatgggacgggagggcaggcagtgtctgtctgccctgcagagctagggccctgtgattattgggggaggggaggggaagggaggggtgggggtggtggcgggaagggggatcctcggagaccttcctcaacctcagcagggacacccggactctggctgcgcccgctggggacccacaacaggcccacatgtcccagaagtttctgctgtgtgctgatctggttgtggtacccggaagcccctgggtgtgcatctggggagcaggggcggtctgccttggggattgaggggcagggagcaccttctcttggtccagttctgaagaacagaaatcaatggcatgaagctcttacagactgcaaagcatttgccatgcgagatcttactctgttctggacaccaaccctcgtagtgggggggtgggggggaggcaccatgaggaatctttacaaagcaggtggccaaggagtgggcagtaacttgctccctggcaggggtacctagggccccttctcagtggctgcctcaaccaacctgtcatttgtaaaaatgctcgctggagggccctgggggcctgactgggattctgtctcttcccatgtcctgttgggtggggaatctaaggagccatcagccctgctccctgctaccctcatcctctcctcaagagctctcatgggtccccccaggcacacgaggttcccccagaagtgtgtgtctccagggagggtgtggaagtgggtctctgctcatcccctgcaccccaggcttcagggaagggagctctcatgaccagacagagtagtaaaagtaaggcaatatcaaagaccttccaacccaaatacaccccgtaggatgtttgttgtttgttagagatgggatattgctagttgtccaggctggtctcgagctcctgggctgaagtgatctcctgccttggcctcttgaatagctggaactaggtatatacctagctaatagggtggtattcctcacttggcaaacccagggctgttacccagaaaaacataccctttcatgggcatccaaaccttggctgagggttcccaggggctcctgggtctctgggaatccctgagggtcccagggactccagtgttaggcccagattgcagtgggggaggggatgtgtacccaggaatggggaaggcccaggcactcatcagttctgtgctccaagctagtggcttctcgacggcaggaccaggccagttcccctcccagaaagcagaccctgccacctgccacgcctggatggcactaatttagtccctgcctttcctggctgggtgaccttgggcaaaaggtgctgagcttctctgagctctgtctcccgtctgtaaaatgggaacgggaatgccaccttgctcaccggtggtgatagggattaaatgtgatcaccctgatctcaggctcaaagcatagtaagagcccggtccacagtaatgtggtgggtgccgggaaagccctccacccctccacccctccaccctcttggaagccacctgccatttctctcctcctccccaccccctccctgcccagggcaccttaggacgcggctgccaggcgaggaggaacatggcagacacacggctgaatttggcccatgcgtcgggtggctgagtcacatccccaaattgcatcttcattggtgcgtttcggaaggtcgtttgcagaggccatcggaggcctacaccccctctgggttctgtctgccaggccacccgcttctcatccctgtgccccccatccccagctggggaagttttgcaccctcggggatggtggaaggggtgcctgggttttcctgggccccctggaggagggcaggatctggggttcctgtgtgcaccctagtgcaagctcccagccccacctggtagccagcggatgttcaggcagtgggcaggggtttgagcctcggagcagaaggcccacctaagtatttgtgaggttacggaaagatcagggccaaggtcagcctcataaactgtcaaatgctgggcccacaaggccaggccttatagactgtgaagtgctgggccggcaggaggtcaggcctgataaactgggaagtactaggccacatgaggctaggtctcataaactgggaagtgctgggcctgcgggaggtcaggccttacaagctgtgaggtgcctggtcacaggaagccacagcctgattgatgtgatgggtgagggtgggaaggggtgggacaagttctgagactcatgaggtcacctgaccatagaaggaatgatttttttttttttttttttttttttttttttttttttttttttttggagacagggtctcactctgttatccaggctggaatgcagtggcatgatctcagctcactgcaacctccacttcccgggttcaagtgattcttgtgcctcagcctcccaagtagctgggatgacaggtgcccactaccacgcccggctaattttgtatttttagtagagacagggtttcactatgttggccaggctggtcttgaactcttgacttcaggtgatccacccaccttggcctcccagagtgctgggattacaggtgtgagccaccacgcccagccagttttgccatgttggccaagctggtcttgaactcctgacctcaagtgatctacccgcctcagcctcccaaagtgctggaattacaggcatgagctaccgcgcccggccacaaagaaataattcttgcactcctgtgtgctgacaccagtatctggagacacatcgtgagggacagacacagtgtggggggtgccggacaaaggcataggtggtcctgcaatgtgtgcggcagccaaagtcacccatgtccaactcagcagtgtagctcatttttttttttttttgagacagagtctcactctgttgcccaggctggagtgcagtggcgtgatctcagctcactgcagcctccacctcccgagttcaagctattctcctgcctcagcctcccaagtagctgggattacaggtgcccaccaccacacctggctaatttttgtagttttagtagagacaggatttcgccatgttggccaggctggcctcaaactcctgacctcaagtgatctgcccacctcagcctcccaaagtgctgggattacaggcgtgagccactgcacccagccaatgtggctcatcttgctgtgtcctggaatgacgatctgctagtctgtcacccccagtgggggtgggaagtgtcctgcctgtgcacacagctgcccccaacccttctcccaggcctggcacatgggggacccctagtgcatgctgttgtgaccatttcaaaggggataacacttggcctccacccacccctgcccagcttgttgggaaaatctcacaaaggagccgggtccggaatcttccctgcaaggagaaggtgtgtcttcaggcaggtttgtattattattattttttttttgagacggagttttgctcttgttgcccaggctggagtgcaatggcatgatctcagctcactgcaacctccgcctcccgggttcaagcgattctcctgtctcaacctcctgagtaggtgggattacaggcatgggccaccacgcccagctaattttttgtctttttagtagagacggggtttcaccatgttggtcaggctggtctcgaactcctgacctcagatgatctgcccaccttggcctcccaaagtgctgggattccaggcgtgagccaccgtgcccggcccaggcagattctttcacaacatcatgccacagtttccccatctgtaaaactggccaaatcccaggacccacttcttggcagtattaggattcaggagaacatttacataaagaatggagcctgggaccgggcacagtggctcatgcctgtaatcccaacactttgggaggacgaggaggaaggatcactggagcccaggagttccagaccagcctgggcaatgtagcaaggcctgatctctactagaaataaaaataaatcatctatggccataccaccctgaacactcccgatctcatctgatctcggaaaaataaatcattagctgggggtggtggcgcatacctgtagtccttgctgcttgggaggctgaggtgggaggatcgcttgagcccaggagtccgaggctgcagtgagctaggattgccccactgcactccagcctgggctacagagcaggcaaggagtgcatttgagggtctgagatactgggctgggcagggcaggggagaatctgacaagttggatccagagtctcagacagcctctcaatgccttggtgagcatgatgactatgtcaccatcattgaggtccctgctctcacacatgatgccacaggacattgctctgtaatcacacagggtgcttttcaaatagcctggcagggaaacaggctagcctgagatcatagagcccagccaagcatgtcttatgtcttacaaagccctgcagaatcgattctagatcttggagttaaagcctgcattgccacactgtttggagatcatggatcccctcctggaaaccatttggattctgtttggaatctgtttggagattatggatcccctcctgcccaggcaggagggagcctcaggatctctgtagccacagccagggtccctaatgtcccataggccacagtgcaggagcctacaaatgcaggaggcacggtgaggtgaggttaactcatccaagagtctgaaggttggaagaggatgagctcagatgaaaaccaccttctaagcataccattagccaccctctcctcccaggcaagcccgttggtagatttcatcttccagcgttcagcaagtgtttcctgagtgtcatctgtttgctaggcattgttctaggtgcttggatacacataaagtcagcaggcagggctctggtaggggggcattccaggcagagggcacagcctgtgcaaggtatcagagaaggatgaacttgttggaatctggtgattgggagaccattgtggctggaggaattgggtctggggagagtaagaaggacgagataggtgggaaccagatacagagggccccttggccatagtgaagagtttggtgttttatttgtttttgtttttgttttttttagagatcggctctagttatgttgtccaggctggatttaaacccccagactcaagtgatcctccagtctcagcctctgagtagctgtgattacaagtgtgcaccactgggcccagctctggagtttctttgttctttttcttttttttgagacgtagtctcactctgccacccaggctggagtgcaatggcatgatcttggctcactacagcctctgcttcctgggttcaagcgattcttctgcctcagcctcccacgcagctgggactacaggcatgcaccactacgcctggctaatttttgtatttttagtagagactggttttcgccatgttggccaggccagtttcgaactcctgaactcaagcggtccttctgccttggcctcctaagtagctgcaattaccagagctgcaccaccatgcccggctctctggggttgattttttcagtgagatggcactggggagccatggcagggctttgagcaggggagggattcaggctgactcagatgtttctgggatggtaaacccacgtgtcagcactctgggccactcccaaacttagaacgttctgggttggccgggatggtccttgcctttctggtcagtaagctggaccctgctgtgaccatgtccctctgtgcccttgcaggtcagtgcaggagcccagccgctgagccatgccgggccccgggcggcctgcagcgagcccaacccctgcacccaggtagtcatgaacagccacagctacaatggcagcgtggggcggccgctgggcagcgggccgggcgccctgggacgagaccctccggaccctgaggccggccaccccccacaacccccgcacagcccgggcctccaggtggtagtggccaagagtgagccagcccggccctcacccggcagcccccgggggcagccccaggaccaggacgatgacgaggatgatgaggaagatgaggccggcaggcagagagcctcggggaaaccctcaaatgtgggccaccgcctgggccaccggcgggcgctcttcgagaagcggaagcgcctcagcgactatgccctcattttcggcatgtttggcatcgtcgtcatggtgacggagaccgagctgtcctggggggtgtacaccaaggtaggcgtggtcctcccccaggcactccagggaggttccaccaagcccgcctagctttcttgacatggggttgggggtggcagggccccccgggagatagggagtgttagggggctcccggaggtgagggctccctggccttctgcatacccacctccaggaaggtagcagggaggctacacatggagaaggaaggttccagcccattccctggccaggtgtcaaggggctgcaccctggcttaaggcggaggggggcttccccccaggacaggggttccccagagtgggcctgctctggggagcaacagaagatcttcctccccttccgagagtgagtgcgtccaggttacaagcctggctgtgggttccctcatgccacctagaatgtgtgaggatggagagagatcagggctgtgtcagcctgtaaactctgaagtgccgaggctggatgaggtccggccttgtgaactgtgaagtgctgtgcccaagtgaggccaggcctcataaactgtgaagcactggacacatcttgctgtcagcccagtccccaggaataaggacaggagagcaccgcttcctgaatacagcacatgctgcacgcccagccctgataagctgtttcacacacagcagccccaggactggggaactagcagaaattcagggtacagtgggagaagccactgggaagagccccatttagctgactcccatgcccgggagccagggtaaggggatgggagggccgccggcccaccgcctccagcgtccatctggctgtgtcctctctctttaccaggagtctctgtactcattcgcactcaaatgcctcatcagcctctccacggccatcctgctgggtctcgttgtcctctaccatgcccgggagatccaggtcagtgctgaatactgcaggaagcagctcctctcctcaaaccccagatccccccacaccagcccaccttagaccccatcccctcaaaacataaaaggatgtataattggcttctgatagaaaaaagatctccataaagacacacagtttccatcattctagatttccttgaaacacacatctgtgttttaattttcattgattatttacaaaaaagaacaggtagtgagaaagtgaggggctgagctgggactctgggacacacgggttgtttccaggctggagtgcagtggtgcgatattggctcgctgcaacctctgcctcctgggttcaagcgattcttctgcctcagtctcccgagtagctgggattacaggcgcatggcaccacaccttgctaatttttgtatttctagtagagacgggatttcaccatgttggccaggctggtctcgaactcctgacctccagtgatccacccgtctcagcctcccaaagtgctaggattacaggtgtcagccactgctcctggcctatttgtttagtttttgagacagggtctcactctgttgcccaggctggagtgcagtgatgcagtcatggctttgacctcttgtgttcaagagattttcctgccacagcctcccgagtagctgggactacagctgcgcaccaccacacctggctaatttttgtattgtcttgtcagtgtctcgccatattgcccaggctggcctcaaactcgtgggctcaagtgatcggcccacctcaccctcccaaagtgttgggactttacaggcatgagccaccatgcccggctgcacacgcatgttgataacagcactgttcaaagtagccaaaaatcacacctgtgatcccagcactttgggaggccaaggcgggtggatcacttggggtcaggagttcaagaccagcttggtcaacgtggtgaaactccatctctacaaaaattagccaggcatgatatcgggtgcacgtaatcccagctatttgggaggctgaggcgggagaatcacttgaacctgggaggcagaggttgcagtggagctgagatcgaaccattgcactccagcctgggcaacagagcaagactccgtctcaaaaaaacaaaaatacaaagtagccaaaaagcagaaacaacatccaaatgtccatccaggcatgaatggataaataaaatgtagtgcacctgtacaatggacaattattcaacctttttttttttttgagacggagtttcactgttgttgtccaggctggagtgcaatggcacgatctccagctcaccgcaacctacgcctcctgggttcaagcaattctcctgcttcagcctcccgagcagctgggattacaggcatgtgccaccacacccagctaattttgtatttttagtagagacggggtttctccatgttggtcagggtggtctcgaactcccaacctcaggtgatctgcccgcctcggcctcccaaggtgctgggattacaggtgtgagccaccgcgcccagcataacctttttttttttgagatggagtctcactctgttgcccaggctggagtgcagtggcgcgatcttggctcactgcaacctccgcctcccaggttcaagtgattctcctgcctcagtctcctgagtggctgggattacaggtgcccgccaccacgcctggctaatttttgtatttttagtacagatggggtttcaccatattggccaggctggtctcgaactcctgacctcagggtgatcctcccaccttggcctcccaaagtgctgggattacaagcgtgagccaccatgcctggcctattcaaccttaacaaaagaacgaaacaccaaaacagcagaaatgtattgtctgaaagtctggagtatagaagtctgagatcaaggcgttagcagggttggttccttctgagagccatgagagacaatccgtcccaggcctctctcctagcttttggttgctgctggcaattttgggggttctcagcttaggagatgtgtcactccaatctctgccttgaggatcacatgatgttctccctttgagagtgtctgtgtccaaatttcccctttttaaaataagaacaccagtcattattggattagggcccactgcaattagatgattccacttttttttttttgagacagagtttcactctgtcacccacactggaatgccgtggcttgatcacagatcactgcagcctcgacatcctgggcttacacagtcctcccacctcagcccccaggtagctgggattacaagcacttgccaccatgcccagctaatttttaaattttttgctttttttgtagaaagggggtcttaccatgttggccaggctggtcttgaactcctgggctgaagcgatcctcccacttcagcctcccaaagtgctgagatttcaggcgtgagccactatgcctggcctgattccagcttaacttcattttaactagccgacctcgttacaatgacctcatttaacgagatgacctctataaagaccttatctccatataagagcacattcagaggtactagaggtcaggatgccaacatatctttttcagcagaacacaaatcaacctataacaatttctgatactgaacatggatgaacctcagaaatacgacgctcagcagaagaacccagacataaaaggccacaaattgcatgcttccatttatgtgaaattttcagaagatgcaaatccgcagagacagaaaggagattagtggttgccgggggctgggaaaggagcgactgctaatggggacagggctcccttttggggtgatggaagtgttctgaaattagatagaagaggtgtactaaatcccactgaattgtgcactttaaatgggagaattatacggtttgtgaatttcatatatgtatacttgttttttttttttttttttgagatggcgtcttgctctgtcacccaggctggagtacagtggtgcaatctcagctcattgcaacctccgcctcctgggttcaagtcattctcctgcctcagcctcctgagtagctgggattacaggtacctgccaccacacctggccaatttttgtatttttcgtagagatggggtttcaccatgttggccaggctggtcttgaactcctgacctcgtgttccacccgcctcggccttccaaagtgctgggattacaggcatgagccactgcccagcctgttttttttttttttttttttaaacacaggatctcgttctgtcgcccaggctggagtacagtggtgcagtcagagttcactgcagcttgtacctcctgggatcaaggagtcctgcctcagccttccaagtagctgggaccacaggcacagaccgccatgcccagctaaatgtaaaaccttatatatacagatatataaaaccatacatatataaagacaggattttcctatgttgcccaggctggtctcaaactcctgggctagagtgatcctcctgcctcagcctcctaaagtgttgggattataggtgtgagccacagacccggcttttttttttaactgtaattcaggctggacacagtgactcacgcctgtaatcccaatactttggaaggccgaggcaggaggatcactcgagcacaggagttcgagatcagcctgggcaacgtggcgaaacaccgtctctacacaaaaattttttaaacagttagccaggcatggtggtacacatctgtagttccagctacttgggaggttgaggtgggaggatcacctgagcccagggaggtcaaggctgcagtgagccatgatggcgccactgcacaccagcctgggggacagaatgagactccctctcaaaacaaaaaacaaaacaaaacaaacaaacaacaaaatggaggcagtatggacagtaacatagcaagaccccttcctcttaaaaaaaaaaaaaaaaaaaggccgggctcacgactgtaatcccagcactttgggaggccgaggtgggcggatcacgaggtcaggagatggagaccatcctggctaacacggtgaaaccccgtctctactaaaaatacaaaacattagccaggcgtggtggcgggcgcctgtagtcccagctactcgggaggctgaggcaggagaatggcgtgaacccgggagtaggagcttgcagtgagccgagatcgcgtcactgcactccagcctgggcaatggagcgagactccgtctcaaaaaaaaaaaaaaaaaaaaaaggaaggagttagaggctccagtaagcagtaagctatgatcccgccagagcaggacccggtctcaaaaatagggtggggggtgggggagggggcgtggctgcattcctgatgataccttttgcctccagctccaatatgattggtcccggctccgtaactgacagatgttatgtatcttggcgctcccctcatctcccctaggactggccctggatatggccagggtaccccatggagggtgagcaatggcgctgtagggtgtcctttatgtcaacgctttgccgatgtgcgagcggaggaggcccctagaacgcgcggccgccacattttaaggaagtgacttttttttctttttcttattttagaatgactttattgcttcttatttttaaaatgacacgtgaaaaaggaaaaaaaaagatacttaagagttatacacacgttcagaaggaagagaaaagtacagtgaagggctgggcacccacacctggaatctcagcactttgggaggctgaggagggaggactgctggagcccaggagttcaaagccagcctgggcaacagagcgagtccccatctctgcattaattttctttttctttttctttctttttttttttttatcgagacaagagtctcactctgttgcccaggctggagtgcagtggcgcaatcttggctcactgcaacctctgcctcccaggttcaaatgattcttgtgcgtcagcctctcaaggctgagattacaggcacccgccaccacacctagctaatttttttttttttttttttttttttttttttgtatttttagtagagacggggttttgccatgttgcctgggctggtctcaaactgctggcctcaagcagtcctcctgcctcccaaagcactgggattacaggcaggagccactgcacccattctgtttccacttttggaggttgtgaatagtgccgttgtgaatgtgtctgtccaagcgtttgcttaaacacttgttttagtttctcttgagtctgtctaggagtgggattgctgggtcattagtaactctatgttgaactttttggggaacactcatatttcgttcgaactgtggccagtgctgagaactagagagttttgcatacgaggtcacgtttctgacttctcttggaaaaatttgaagctggtgcggttgctcacacctgtgattccagcactctgggaggctgaggcaggaggacacttgaggccaggagttttagaccagcctgggcaaaatagggagaccccatctctacaggaaatttaaaaaattagccaggcatggtgttgcatgcctgtaatcccagctcctcaggaggagactgaggcaggaggatcacttgagcccaggaggtcaagactgcagtgagctgtgattgcaccactgcactccagcccgggcacagagcaagaccttgtctccaaaaaaaggaaaaagaaaagaaaaatcctcgccaggcacagtggctcacacgtgtaatcccagcactttgggaggccgaggcatgtggatcacttgaagtcaggagtttgagaccagcctggccaacatggtgaaaccccgtatctactaaaaatacaaaaattagccaggcatggtggcaggcacctgtaatcccagctactcgggaggctgaggcaggagaattgcttgaacccgggaggcagaggttgccaagatcgtcttcatggtgcatgagccaagtgaaccaggattgcgccactgcactacagcctgtgcgacagagtgagaccctgtctcaagaaaaagaaaaagaaagaaaagaggctgggcatggtggcttacgcctgtaatccctgcactttgggaggccgaggtgggcagatcacctgaggtcaggaattcgagactagcctggccaacatgatgaaaccccatctctactaaaaatacaaaaattagccaggtgtggtggggcaagcctgtaattccagctactccggaggctgaggcaagagaattgctttcacccaggaggcggagattgcagtgagcagagatcgtgccactgcactccagcctgggcgataagagcaaaactccatctcaaaaaaaaaaaaaaaagaaagaaagaaagaaagaaaaatccgagcctgtggggtttcaggccaggctgacgtcactctctgggggcgcggtggggctgggcagggagcgcggcgcgtgtctgacacccatggctggttccctcccgccctccacagctgttcatggtggacaacggggctgatgactggcgcatcgccatgacctgcgagcgcgtgttcctcatctcgctagagctggcagtgtgcgccattcacccggtgcccggccactaccgcttcacgtggacggcgcggctggccttcacgtacgcgccctcggtggccgaggccgacgtggacgtgctgctgtccatccccatgttcctgcgcctctacctgctgggccgggtgatgctactgcacagcaaaatcttcacggacgcctcgagccgcagcatcggggccctcaacaagatcaccttcaacacgcgcttcgtcatgaagacactcatgaccatctgccccggcaccgtgctgctggtcttcagcatctcctcctggatcatcgcagcctggaccgtgcgcgtctgcgagaggtgcgaccgccgcccctggagcccccccagcccccagcccccgtctccctggacctccatgcccattcatgatttcaccgaccctgggcccctcccgaccctggccattgcttctgtctccccgactgcaagacacccgtggtgcctcctgtcttccagtttgtggcttcagtaatcatcctccctggggacctaaccctgtgtccccagctgccctcaaccagggagggaccccagctccctctccctcatcctccctgccagggtctcccaagcttccttctcccagcccctcggctccctgggaggctgactcccgatctctggccccggggggcgcaggcagcaggcacagggatgcctccccgtcccctctgtctcccatctcccacgtttaaccagctttcattttcccctctgcccgctccactggactttagggaaaacatgtgagtcccaccctccgctgagctgtgtgcgcagagcagccactgccaccgctgccgccatccccgacccgctaggaatttaagattagctgccgcaaggggagggaggcagggagaacgggcccggcggggtgggtcggggtaagtcaccccgtcacgggggcaggccactccactgggcgtcctctccgagcctcagggcccttgtgtccgaagggtgagggattaaggaagggcttggctctcatgttgtgtttgggcagctgacccctgggagctccgatgtttcctcccaagacttaaatggatctggggtgggctaggtgcggtggtggtgcctgtgatcccagctactcgggagcctgaggcaggagaatcgcttgaacctgggacgcggaggttgcagtgagctgagattgcgccactgcactccagtcaaaaaaaaaaaagacaaataaatgggtctgggatgaaggaaaaccggccgtgcctttgggacctccaagcaggagggagtctgttgtaaatacccctaggaggtggtggaccatcaacccgatttacagagagggaaactgaggctctgggggacaaagggacttgcccggagccttgagtcctggcagtctcagaggcaggaggggctccgccaggcctggggtgtgagggtgccttatctgggagagggtctccctgccatgcgcctagctggtggaggccctggaggggtccctggctggacccctgcttgccctcagcaccccatcctcatccctccacccagcccccaccccccatactcccacgggccctgcctgggcatgaggcctggctctcagggatgaaaggcccagtttctctggctgttaaggcttccagggctctccttgggctcttgatgttcccccatgcagctctcacacccctgatgggtggggtcagaactagggttaggggtatggggtgcccctcgtcaggtatccctgaggtccaagctgggtccttgcagggctctgggggggtggggcacggggcagggccggcaggcagccaatcctaaattctgagcctggcgacaatgcttgaagcccccttgcctgcctcgctctgacccacccccgcctcccgcatgtcccccagccgtgctcctgggtggtcccgcggcaccccccaccatcgctccgtctggatctggggctcacccacccaccgactagagggcacccccccgcccctcctgccctctgggggtcaggcagcttggggctcagatgttttggtgtaagatgggggtcagtcagctgggcaccgtggctcatgcctgtaatcccagcactttgggaggccgaggcgggtggattaccaggtcaggagattgagaccatcctggctaacatggtgaaaccctgtctctactaaaaatacaaaaaaaaaaaattagatgggcatggtggcgggcgcgtgtagtcccagctactcgggaggctgaagcaggagaatcgcttgaacccgggaggtgtaggttgcagtgagccaagatcatgccactacactccagcctgggcaacagagagagatattgtctcaaaaaaaaaaaaagatagggtcagtccctgggcctttacccagcaagtgtcctagaagcccagactggaggtgcctggagtggcattcgacttccgcgggagtgaagacccccaaatgccaatatttggggagcccccatctccttccctctggagcctgaccccagccctatccttgggctgtgtcacccactgtgcctggcacaggcctcccctgaagatcctgctctatccaggccacttcctcggtgctaccccagttggcctctgaccttgaacaccccagaggctggcttggggctcaggtgatctaagccctgggaaggagtgggttagctggaagccaggtcagagggggcccagtctccagaaaaaggccaaggggatttggggactgagagctgagtgggaacagatcctagagccacccccagacccagagagccaagccctcggcccgctagcatggccacaggcagaacctctttgcagcccctctggccgaagtcccaagcctggctgtgaccaggactaagttctgtcagtcttggggcctgtctccctgggtcccaaatatagccccaggcatctccccagtgccaaagccgatgcccctctcttcccaacccccagatgcaacataggctgagttgggggactcatgctgtcctccagtctatgtccttcctatatggacgtcccttcttcactcgagccccaggtggtgatcctccagcctcccacctcctccagtcctcctccctccttggggccttgctggctgagaaagttcttcctggtgtctgtcctgaattcttgcctccacctcctgctgcttctggtgctgtggtcacccatccccctgtctgtgtgtgtctgtcgttgggagggggattgtatgttcatacaacctcacctgggcccctctctgccccatccagggaagcagcttgggggggcaggcaaagggaatgtggaagggctgtagcgggggagagggtgcgcctgtcctgtacccacaggacatagccccaacgcagcgaggtggactcagggccctccagccctggcgctgccccagggggtgtgatggaggcaaaggggatggtatagactgagccctccctcttcccactctggctcccccaggtaccacgacaagcaggaagtgaccagcaacttcctgggggccatgtggctgatttccatcaccttcctctccattggctacggcgacatggtgccccacacctactgcgggaagggtgtgtgcctgctcactggcatcatggtaagggtgagggtccatgtgtatgatcctgggaggtccagccagctgcccgctccaccagcccttgcataccccttgctgacagggtgctcatcccatcacgagctgtgcctgatcagcgtccctccatctgtcagtccacccctcccctgctctgctcttttcctctgacgtcacgtggaagccacacccacaggcttcctgggacatctccatgcggtccttccaggcctagatatgcagctcccaccatgcctgcccagtaagaagctgcggtccactctgaccagagagtcactgtcacccctttattctctacagcctgatttattcacagcctttggatccagggcaaggggcttgatgctgatgtgccttagtttcctcagctgtgaccagcgctacttcctctgctttgcaagggctaagtcggttatttatgtgagaatcccagaactgtgaatgccatggacatgctataactacctgctgggggccgggcgtggtggctcatgcctgtaatcccagcactttgggaggccaaggtgggcagatcacctgaggttgggagtttgagatcagcctgtgaccaacatggagaaaccctgtctctactaaaaatacaaaaatagccgggagtggtggctcacacctgtaatcccagtactttgggaggccaaggcgggtggatcacgaggtcaggagttcaagaccagcctggccaacgtggtgagacccagtctgtactaaaaatacaaaattagccgggcgtggtggtgggtgcctgtaatcccagctactagggaggctgaggcatgagaattgcttgaacccaggaggcagaggttgtggtgagcggagatcacgtcattgcactccagcctgggcaaccagagtgaactaagtctcaaaaaaaaaaaaaagaaaaaagaaacctgctgggctgtgtcctctgcagcccaaactcccttccttagctgactttcggggtgttccctgagtttttcgtgacagtgggcgcaggcagcaccccgtctccccgaaggattctcaagtctgccgtgggtgcctgtgaacatcctttcacactcactgctttctcttttccctaattcagtcatcggggtccctgtccatcccctctttccagagccttctttctctccagacatgttttatgcccatgccaacaaacgcttttccatgttttatttttatgtttttataaagatggggtctcactatgttgcccaggctggtcatgaactcctgggctcaagtgatcctcctgcttgggcctcccaaggtgctggagttacaggcctaagcaactgcacctggcccatgcctgactttgtttttttcctcattgagatggagtctcactctgttgcccagcctggagtgcaacggcacgatcccagctcactgcaacctccgcctcccgggttcaagccattctcctgcctcagcttcctgagtagctggaattacaggcgcctgccaccaggctcggctaatttttctatttttagtatagacagggtttcatcatgctggccagtctggtcttgaactcccaacctcagataatccacctgcctcagcctcccaaggtgctgggattacaggcatgacgccaccacgctggccctttttttcttttttttttttgagatagagtctcgctctgtcgcccaggctggaatgcagtggcgtgatctcagctcactgcaaccttcccctcccaggttcaagcgattctcctgcttcagcctcctgagtagctgggatggcaggcacctgccaccaggcccagctaatttttgtatttttagtacagacagggtttcaccatgtcgaccaggctggtctcgaactcttgacctcaggtgatccacccaccttggcctcccaaagtgctgggattacaggtgcaagccactgcacctggtccgtgtctgcttttttgctggcagcccagcatgggtccctccctgtagcatctgtgtggtgcatcatgctgttgcagagccgttgtccattccttttccttgctgtctagtattctaggtggaggtttccagcaagtcactctgtcccagttgacagggattttcctgagaacaggcttctgggtcctctcaaaacctttgtcctggcctggaaaccgagacagggtttcctccgggagcccctgcttgtgctctaggccaaccctgctcaggctcagggtgttggcatctaaacctgcctggggctgggcatggtaatggctcatgcctgtaatcccagcactttgggaggccgaggtgggtggatcatttgaggccaggtgtccgagaccagcctgggcaacatagtgagaccccatatcgctaccaaaaaaaaaaaaaaaaaaaaacagggccaggcgcagtggcttacacctgtactcccagcactttgggaggccaaggcgggtggatcacctgtcaggagttcgagaccagcctgaccaacatggtgaaaccccccctttactaaacaaacacacacacacacacacacaattagcgggatgtggtggtgcacgcttctagttccagctactcaggaggctgaggcaggagaatcgcttgaacctgggaagtggaggttgcagtcagctgagattgtgccactgcactccagcctgggcgacagagcgagactccatctcaaaaaaaaaaaaaaaaaaaaaaagaatcgtcctacctcctggagttgttgggggtcgaatgagctaatgtgtgggacatggttccctctgacatttgatgaataggaaacgagtagacctgaagtcagtgagctcagcagatggaatccactcacactgctggctcagagaatggggaggctgcaatctgggcaggcttcctggaggagggagtgacctcaagacaggacgctgatgtgccccctctgccctgcacacagggagctggctgtaccgcgctcgtggtggctgtggtggctcggaagctggagctcaccaaggctgagaagcacgtgcacaacttcatgatggacactcagctcaccaagcgggtgaggaccgcggttcccatggaggccgcctcctggccttgtcagcgagcgtagaacttccctgctttccctctgtacgtgccgggcatgctcatgtgcccatgggttaccatgcagccccgtgtcaagactgtgctggctttgggaggccaaggcaggtggatcacctaaggccaggagttcgagaccagcctggccaacatggcaaaatcccatctctactaaaaatacaaaaattagcctggcatggtgacggacgcctgtagtcccatccacttgggagtctgaggcaggagaatcgcttgagcctgggaagcagaggctgcaataagccaagatggcaccactgcactcgaacctgggtgacagagcaagactccgtttaaaaaaaaaaaaaaaaggactgtgcttggctctgccaccacgcacccatctgtgagtaatgcacagagagacatcgtggcatcaacccttgtgcccagtcacgtccagccatgagcattcagtaagaggcttgagccagaccgccatatgcaatttgagagctgcctgaccctagcgggttgactgctctgtacctcagcttccccatatagaaaatcagggaaataaaaacacatgccgattcactgagttaacatctgcatcatggccgggcgcggtggctcacgcctgtaatcccagcactttaggaggccgaggcgggcggatcacttgaggtcaggagttcaaaaccagcctggccaacgtgatgaaaccccatctctagtaaaaatacaaaaattagctgagcgtgatcgcaggcgcctgtaatcccagctactagggagagtgaggcagaagaatcacttgaacctgagaggtggaggtcgcagtgaggcaagatcatgccactgcattccagtctgggccacagagcctcaaaaaacaaacaaacaaacaaacaaacaaaaaacattaaaaacatttgcatggtgcatagaaggggcctggcccatcatgagtgatgtgtgttaggtatacacacactgcacagatgttgttgtacaagcatggccctgccttatagcccagggaccctgagaggcatttccagaagtttctagaggtttctggaagattctagacatttctggagccttttggaatttcgcgccaaccctgaggaattgttctttttctggccccaggtaaaaaacgccgctgctaacgttctcagggagacgtggctcatctacaaacataccaggctggtgaagaagccagaccaagcccgggttcggaaacaccagcgtaagttcctccaagccatccatcagtaagtccagcacctttccagctcacgtttctgtgtccacatggcgcggaggcagccctcgcagctctgtgtggcctcttcacggctccctgccagggacgggtggtcagttggttggggcctgcatcttctgagctgggtggatgggaggatcttcagagggaggcagatgatggggtctgctaaatcatggacacgactcagtaagtggcaggatgtatattttattctctggaataaccaggataattcttaccctttagactttgaagcgatttcctctttttgctttgtctgccaggaggctcatagttaaatccatggtctgatccatgggatcatgtaggataactagaaatgaattgggccaggtgcggtggctcatgcctgtaatcccagcactttgggaggcaggaagatcgcttgagtccaggagttcaacaccatccgtggcaatacagggagaccccatctctacaaaaactaagaacttaactgggtgtggtggtgtgcctctgtggtcccagatactcgggaggctgaggtggaaggatcacttgagtctgcagggtcaaggctgcagtgagccatgattgcgccactgcactcagctgggttacaaagtgagaccttgtctcaaaaaaaaaaaaagaaagaaaagaaaaagaaaaaaaaggccgggcgcggtggctcacgcctgtaatcccagcactttgggaggccgaggtgggtggatcacgaggtcaggagatcaagaccatcctggctaacacagtgaaacctcgtctctactaaaaatacaaaaaattagccgggcgtggtggcggacgcctgtagtcccagctactcgggaggctgaggcaggagaatggcatgaacccaggaggcggagctcgcagtaagctgagattgcgccgctgcactccagcctgggcgacagagtgagactctgtctcaaaaaaaaaaaaaaagaaagaaaaagaaaaaaaagaagaaagaaattgcttgattccctatgttgtttctttgccctgagaactatttaataaagtagctctaaatccttggctgctcattgaagtcaccagggggctttttaaaaatcccaagagccacatccaacatcagttacttagtagagtctgggttgcagtctgggtttacatttaaattcctcaaatgactgcttggttgggcatggtggctcacacttataatccctgcactttgggaggccaaggagggaagactgattgaggccaagatttggaaaccagcctgggaaacatagtgagaccccactctatgtaaaaattaaaaaataaagcgaggcgtggtgactcacacctcgtaatcccagcactttgggaggctgagccaggaggatcgcttgaggccaggagtttgcaaccagcctgggcaacaaagtgagaccccgtctctacaaaaataaaaaaattagcccagtgtggtggcatgtgtctatggtcccagctacccaggaggttgaggtgggaggataacttgagcccagaaggtcaaggttgcagcgagctgtgattgcgccactgcactccagcctgggccacagagcaaggccttgccttaaaaaactatatatggctgggtgcagtggctcacgcctgtaatcccagcactttgagaggccgaggcaggtggatcccctgatgtcagcctggccaacatggcgaaaccttgtctctactaaaaatataaaaattagccgggcatggtggcacgtgcctgtaggttgtactgagctgagatcgcaccactgcactccagcctgggcgacagagtaagactcagtctcaaaaaatcaaaaataaaatatattaaaataagtaaataaataaaatttcctcagttgagtccaatatgcagccagtcagcaaactttttctgtaaagggccagatggtaaatctttcaggttttatgggccagaccgtttctgtcccactcttcaactctctgctgctgaggcagggaagcagtgaggataacctggtgtggccatgttccaaagaaaccttattttccaagacaggcggccggctagatttgacccacaggccataatatgctgacgacaatgctgtccactagaatatcacgtgagcaacatatataattttaaatttgctaacagccacattagaaaaaagtacaaaaggctgggcgcggtggctcacacttgtaatcccagcactttgggaggccgagatgggtggatcatttgaggtcaggagttcaagaccagcctgaccaacatggtgaaaccccatctctactaaaaatacaaaaaaattagctgagcgtggtggcacatgcctgtagtcccagctactcggaaggctgaggcaggagaatcacgtgaacctgggaagctgaagttgcaatgagccaagatcactttgagacagtcccctggactggcttaggtacagaagggagtgccagcaggtgcagtggctcatgcctgtaatccttttggaggctgagacgggcggatcacatgaggtcaggagttcgagaccagcctgaccaacatggtgaaaccccatctctactaaaaatacaaaaattaaaccaggtgtgctggtgagcgcttgtaattccagctactcagaaggctgagccaggagaatcgcttgaaccggggaagtggaggttgcagtgagctgagaccatgccactgcactcccgcctgggtgacagagtgagactccgtctcaaaaaaaacaaagggatggtcaaaaggggcgagggcatacactaaccaactccccctgcggccagctgtccagagaccagggtcaccagtgccaacaccaacaccaagtagcaagtgtgggttcaaatcctgccggggtgcggatgggcagtggctttacccctctgagcctcagtttccccctcaggagatggtgtcggcatagttttctgaatgaaacaccgcctccggtggtggtgagaggacaggtgtgcccctgaggggctggcacagaaccctcagaggctgggcacctccccagagcaacggcagcccctcggccatctgggaaccccgcgcggggccctagggtggcatccccgggaggtgggcagggttgggtacatgccgaacaactgtgctgaggttaaaattgccttgtgatttttctcctgctctgcccggtcctgccagggctcagaagtaagtgttctcccaggggcttggtggggctgggaaatcgggggtgcatggtggtcacagacagggggtacacccggggcatgccaaccccagcctcagaggcgggcagggttcacatctgccccatggatccgtgcaggcttcaccttggtctgggatccaacttcctggggcagtcctgagttgggccggagacaggaccagccaatgggtggtgtgggcggtggccaggctgacttctggccctggcgcaccggctgtgtactgggagggaatagactacagggaatcggcctcccaactcccacctcatcctctgatgcatgtcccataggtgaccccgggtgggtgcatgaaagtccctgcccccactgcagcctccacgggaacctgcctaaccccctcccccaaccccgtgtccccacaggctccggagtgtgaagatcgagcaagggaagctgaacgaccaggctaacacgcttaccgacctagccaaggtgagtgggttggggcagggtgggccagacagggcaggtggggccccggagcagatgggatggggctcagctcctgccggaggagggcacaaggacccgctgtgggctgagtgcagtggcgggcggatcgcttgagctcaggagtttgagaccagcctgggcaacatggtgaaatcccgtctctacaaaaaaaatacaacaattagccaggcgtggtggcgggcgcctttaatcccagctacttgggggctgagggaggagaatcgcttgaacttggggggttgaggctgcagtgagccgagatggcaccactgcagtccagcctgggtgacagagtgacaccctgtctcaaaaaaatgataataattttaaaaataatttaaaaatttaaaaagagtacacaattagggggctaaatgggtgaagaggtatttctagatttaggcataccacctcaattcaagatctgaaatggaagagaaaaaattcctttgctatgggtataaattcaaatgatagccttgggagaaagctttgtataatttgtatagcaattaaacatctgtcaggaaatttaaattgattgcaagagaaattggggccagctgggttcaatgggtcatgcctataatccctgtactttgggaggctgaggcaggcagatcacttgagcccaagaggttgagaccagcctgggcagcacagagagaccccatctgtacaaaaagaataaaaaaattaaccaggcatggtggtgagtgcctgtagtcccagctattagggaggctgaggcgggagaatcacttgagcccaggaggtcaaggctgctgtgaggtatgatcactctgctgcactctagcctgggcaacagagcgagaccctgtctcaaaaaaaaaaaaaaagcaagaaagaaatcagtttgtgttatacatggatctgtgtgttgattcgaatatcaagtcatctcccacttttttttttagctttatttatttattttttgagacagagtcttgctctgtcacccaggctggagtgcagtggcgtgatctcagctcactgcaacttccgcctcccgggttcaagcaattctcgtgcttcagcctccagagtagctgggattacaggcatgcaccagcatgcccggctaatttttgtacttttagtagagacggggtttcgccatgttggccagcctggtctcgaactcctgaccttaagtgatccacccccctcagcctcccaaagtgttgggattacaggcgtgggccaccgtgcccagcccatttcccactttttgaattcttccactggaagatgtgtcactggaccagttgcaattaatcaagtgcttgagatctttgcaacactgatttgaattcccttctgaccaatgacatagtttcagaaaatagcttttgctcagtggctacatcccctgatctatcagtcagcttgaggctaatttcatgttatctttagaaaatgttaagtcccattctattttatttcttgtccccagtgcattttggactcacttcctccatcactaggaagagaatgcaatctagcttaatattaacctacaagaaatttaatttggaagggaatcttcttttttttttttttctgagacagggtcttgctctgtggtacaggctggagtgcagtggcaaaatcatggctcaccgcagcctcaacctccccaggctcaagcaatccccccaactcatcctcttgagtagctgggactacaggcgcacaccaccaggtcctgctaatttttgtattttttgtagagatggggtttcaccatgttgcccaggctggtctcaaactcctgagctcaagtgatcctcccgccttggcctcccaaagtgctgggattacaggcgtgagccaccgcacccagaaaagaatcttacagagagaaaaacatattctagacccctgaagatatacagttaactctcgaacatgggggttatggggtgctgaccccttaaaagtcaaatattcccatataacttctttttttctttttgagacagagtctcactctgttgcccaggctggagtgcagaggtgcgatctcagctcactgcagcctccatctcctaggtttaaggtattctcctgcctcagcctcctgagtagctaggattacaggtgtatgccgccacgcctagctactttttgtatttttagtagagatggggtttcaccatgttggccaggctggtctcgaactcctgacttcaagtaatccacctgccttggcctcccaaagtgctgggattacaggcataagccactgtgcccggcctcatataagttttgacgccccctcaccccaaatttaactactgatagcctaccattgaccaaaagccttactgataaacagttgattcacatatattttgtgtatatatactgtattcttacagtaaggtatggtagagaaaggaaaatattaagaaaatcaggccagatgcagtggctcatgcctgtaatcctagcactttgggaagttgaggaggggggatcacttgagctcaggaattcaagaccagcctgggcaacatggcaaaactccattgctacaaaaaaaaaaaaaaaaaaatagaaaaattagcaggaggctgaggtgggaggatcacttgagcctgggaggtaaaagctgcagtcagctgtgactgtaccactgcactccagtctgggagacagagcaagactctgtctctaaaaaataaaattttaagcctgggtgtagtggctcatccctgtaatcccagcaccttgggaggcaaaggtgggcggatcacctgaggccaggagttcaagaccagcctggccaacatggtgaaactttgtctccactaaaaatacaaaaattagccgggtgtggtagcgggcacctgtaatctcagctacttgggaggctgaggcaggagagtcgcttgaacccaggaggtggaggttgcagtgagccgagatcatgcctctgcactccagcctagacaacaagagcgagacttcgtctcaaaaataaaaataaaaataaaaattttaaacctcagaaaagactaaaaagaaccacctgaaggctggacactgctctggcctccagatgtcaccctctggctctagggactgtggtgcctgagagaggccagggtaaggtcagtggtgctaggaggggaggcccccacaaggtgtttgcactcggagtggggtctgccttgcactgatggagggaaaagggtagggggcacagtggaggaagctgggaggaagaggctgggtgtgagaggacagaggagctggggtgggcacctcgtcctgtcctgtcttccttccaccactgcctccatcctcccacggaggccgccgcggggtggcaaaccggtgtcctgacccagctgcgctcagagccgtggagtgatgttctagtgccacctggtggccagagtggtgtctgcacccaggactgtccctgcctggccggcctcccctgcccatagggggacagtgccagaaccgggcagttgaggtggtagggatgccccactggctgctgtaacagtaattgtggctgtcgtgttcccagtctgtgattgcgtcagattctcagggcagtcaccttcgtcattagacccctgtcccctccccagcctaatgggaggggtggcagttcacgactgaacagggtcccccctcctcttcttcctaggcagccatgtccccacgctcctgctgttccccagcctggagcaacgtcagccccaaacatcccccaggtctgtgggtaccacttgagcactgcctgtggctatgtgtgccctgtggccactagacccccagggcagctctgggcatgtccccccaccccagaacctcactaggcctttcccaggcctgccagccctgagcttggcttgcttgctttctttttcttgagacggattttccctcttgtcactcaggcgcactgaaacctccacctcctgggttcaagtgattctcctgcctcatcccccccgagtagcggggattacaggtgcccgctaccacatccggctaatttttgtatttttagtggagacaaagtttcaccatgttggccaggctggtctcaaactcctgacctcaggcgattcgcctgcctcggcctcccaaagtgctgggattacaggcgtgagccaccacaaccagctgagcttggcatttaagacctgtcttttaggctgggcgcctcccggaaagaggaggttgtaatgagccgagattgggccactgcactccagcataggtgacggagggagtctctgtctcaaagaaaaaaaaaaaaaagagagaaagaaaagaccagtctctcccctcatccactctccaatccttccctgggcccagcaagggacctctggggctgggggtatcctcccagccacccctcacacgggccccattagtggctggcacccacctggagcgtgtgggctgtccctctctgtcattggtgtcgtggtatcgtcctttcctctctcactcagcggcgcctctctcctgcccctctctgtctcccgcagacccagaccgtcatgtacgaccttgtatcggagctgcacgctcagcacgaggagctggaggcccgcctggccaccctggaaagccgcttggatgcgctgggtgcctctctacaggccctgcctggcctcatcgcccaagccatacgcccacccccgcctcccctgcctcccaggcccggccccggcccccaagaccaggcagcccggagctccccctgccggtggacgcccgtggccccctcggactgcgggtgacggccctgcccgccaccagacccctaaatcttggccatcgtgtggccgccacctccgggaagccttgtacagtggcgcctcttggagttcaagaagccaacgctgagtcaggctgagtggactgaggcctgccccgcccagactgcccaggcagagggcagggctggaccatgggtgagggcaggggagcccggagcttcctctggtcacctggtcccccgactctccccaggcccccggtgggcatggagcagcccggggaggggtccgtgctggttctgaataaagcaggacccgcctagtggctgcctgtgtgcatggctggaaggcactggtgatgtcccaggaggtagacctccagccctgggtaccaagatgaatgtgggaatcagaaaaacctgttcccatcaccggcctagcctagaatcctagcctagaagccctctctccctctgggctggagctcagtgagggacaactctctagggacacctgtaccagccccacctggcgctgagatccctcagacagcatggcccagccctggccagaagcatcgctccccttcaaccaaccgcgttgatggacacccactgtgtgccaggccccagcggggcccatgggggaggtgacctgggtgaggaaggtcatttgggtttttgtgagatttgtattgagcacctgctgtctacagagaatgtgatgatgtcaattaccacactgattcctcatcagaacttgaccatggtgggatgggggggaaactgaggcccagagaggtgaatctacctacctgggaccacactgcgaggaaggatggtgcattcaaactggaaatcccctaggccaaagtaaagaaccggactggctgggcacagtggctcacacctgtaatcccagcactttgggagggtaaagcgggcggatcacctgaggtcaggagttcaagaccagcctgggcaacatggtgaaaccctgtctctactaaaaatataaaaattagctgggtgtggtggtgcacgcctgtaatcccagctacttgggaggctgaggcaggataatcgcttgaacccaggaggtggaggttgcagtgagaaaaaacctggacttggtggaagggactccatggaggagccatggggacgtcaggaggaggggttatttggtgacatccaggggtcagagagacccttcaggggtgggctacaggggagggttccagacacaagtagaatcagaaaggtccctggaggccatgggcttgggtgctgggagcaacaggcatttacttggcagatgctgagccctgggtggggcgaggaggcctggctcctggggagacgacgctgtgcatagccgaggagccccaggtcctggcagcctctgataaggccatccatcgcctggctcaacgagataactaggccgtggctggtgcatgaatgaccagcttgggcccacgcacgagaagggtatgaggaggtgctggtcagacccgggttcgagtcctgactctgccactgctgggtgactctgagcagtggctgcccctctggggccttggttgtttcatctgtaaaatggggtgacagtctatttaaccagaactccctaaaaagggccaggcaactggtaggtgctcaataaatgctccttcccgcctgagggatcacactggagtctttggcaggactcatcctttctaccctgttgtctggctggggaaactaaggcctgagaaggaaaggggctgtccttcagggtgagaacccagggtttggttaaggaacatccgtgggtgtaccttctgtgccagtggtagctcccaggtctgatggcagaggcacagtaaacccatagtacttaaaaaaaaaaaaaaaaaaacaccaaagccataaagttatgaacaggccgggcgtggtggctcacgcctgtaatcccagtacttcgggaggctgaggtgggaggatcacctgaggtcaggagttggagaccagccggccaacatggtgaaaccctatctctactaaaaatacaaaaattagctgggcgtggacgactcctgtcgtcccaggtactcaggagactgaggcaggagaattgctagaaccagggaggtggagattgcagtgagccaggatcacgctactgtgccccggcctgggcgacagagcgagactctgtcttaaaaaaagagagagagaaagagaaaagtaaacaaggcaagaaagaaagagaaaaaaagaaagagaggaaggagggaaggaaggaaggaaggaaagaaagaaaaaacagagaaaagtaaacaaggccagaggtggcaaggggactctgaggaagtggcatttgggcgtgggcgggatgggtgggagaacggatctggtagcggaacggcccagtgcggaggcgaagagagctactcgaggtggattttgtttgagggacagccatgaagtgacaatgacggggagactgaggcggtgccgggttctgggcggcggggggggcaggggtagtgaggggcgaatgagaccatagggctgagatctgcggccgcctcggtgcctccccagccacctccgcccctgcctgcttctgattcaacagcgccgaccctacaaaaacagggcccgcccatctccgaggatggcaaagtcaacagtgcgggcacgcgggcggccagtccccggcggcccgcgtgcgtcacgggggcggatgcagaggaccaggaagttcgccgacgacgcgcccgccctgggccaccggcgccggcccaagttcgccgggggggcccggaggaagcttgggggacgcgacgggggaacgcggaaaccccggggatctgcaggcgcgcccgggccgtgtgccttctctccgcgtgtccaaaccgtgtccccagccgcgcgccatgcgctctgggggcgtgcgcagcttcgcgctggagctggcgcggggcccgggcggcgcctaccgcggcggggagcggctgtgcggccgggtgctgctggaggcggcggcgccgctgcgggtgcgagcgctcgaggtgaaggcgcgcggcggggcggccacccactggttggagggtcgcagcgtgggcgtcaacgccgtatccagcgactacgcggccgcggagacctacctgcggcgtcggcagctgctgctccgaggtgagacactcgtcgcgccgcccccgcagcagccgggaccccctcggccgcgaccctcttcagggccggaagcctctcaacttagaacctatgcggtcgggtgatccttttcaaggagggggaaacccccttcccggggtcctgaccctcccacaggtcaggagttcaagactagcctgggcgacatggtgaaaccccatgtctccaaaaactacaaaaattagccaggcttagtggcgcgcgcctggagtcccagctacaggctgaagtgggaagatcgcttgagcctgggaggtagaggttgtaatgggctgagatcgcaccactgcactccagcctggacacccaccccgccctggtcaggacccccactaaccgggaacgtctacccagggtctgggtgttcccttctctggagccagactccctcaacttagactgtgcggtggggagacccctttcaaagcagggggaccctcctattagagtccaggaaacccgcgggaagtagagtgggagatctccctggtggaccccagtgtccccgttgatcccaggcctggagtccctgattctcagagaaggcccccaactcgtgttacccagggccccacctcagtttaccccacagggtctgcagcgctgagttcttccctggggtagggttgggggtctggtggtatttcccggtgaggaggtggaaatgcatcccagaggggaagagatgaagtggggtcacattctcctgggagtctgggtcttgggcaggtccctactcttccccgaacctcagtccttctcgcaccccaagcgcccctaggccacgcagctggtcaccagcgagccaggggtcacagaaggaggcagtccataccctcacaccctactgtgtggctgcgggagggcatcatcctctctgggccgccctggctattcctccgggccaagccagacctcactatacccgtctgtaaaatgggccgggagggaggcagctcagattctcgacagccccacttttttcccagcgctgcgggcaatagaagttttgggcacacaagagccacaggtgcgggggacccttccctccccagcggtggaaacagaagcaagtgcggtggggcagggcaggaaggggcccaggaggcacttcccttccccggcgactcggagaactcttgggaccgctttcacccgaaggccggcccagacactcaacggcgacttccttaaaacactggagaggcagccgggtgcggtggctcacgcctgtaatcccagcactttgggaggctgaggcgggcagatcacctgaggtcaggagttcgagaccagcctggccaacatggtgaaactttgtctccactaaaaatacaaaaattagctgggcgtgctggtgggcgcctgaaatcccagcaactcgggaggctgaggcagaattgcttgaacccggcaggcggagattgcagtgagctgagatggcaccactacactccagcctgggcaacagagcgaaactccgtctcaaaaacaaaaacaaaaacaaataaacaaaaaacactggagaggcgagcctggtgggtccacctgtggtcccagctatcacagaggctgaagcggaaggattgcttgagctaagttagaggccagcctgggcaacataatgagacctcccaccctccactccgtttttgtgtttgtttttgtttttgagacagggtcttactctgttactcaggctggagtgcagtggcacgatctcggctcactgcaacctctgcctcccatgttcaagtgattctgcaacctcagactcctgagtagctgggactacaggtgcccgccaccacacccggctaactttttgttttgttttgttttgttttgttttgtttttctgagacagagtctcactctgtcacccaggctggagtgcagtggcgccggcgcaatcttggctcactgcaacctctgcctcccaggttccagtgattctcctgcctcagcctcccgagtagctgggattataggtgcccgccaacacgctggctaatttttgtttgtttgtttgtttgtttgtttgggggacggagtctccctctgctgcccaggctggagtgcagtggcaccatctcggctcactgcaagctctgcctcccgggttcacgccattctcctgcctcagcctcccgagcagctgggactacaggcacccgccaccacgcccggctaattttttgtatttttagtagagacggggtttcaccatgttagccagaatggtctcgatctcctgacctcgtgatctgcccgcctcggcctcccaaagtgctgggattacaggcatgagccacagtgcccggccaatttttgtatttttagtagagacgggtttcaccatgttggccaggctggtcacgaaatcctgacctcaggtgatccatccacctcggccttccaaaatgcttggcttacaggcatgagccaccatgcccggcccccatctctttaaatacataaaaattggctgggcgcagtggcttatgcctgtaatcccagtactttgggaggctgaggcaggaggatcacttgaggtcaggagttcaagaccagcctggccaacatggtgaagccctgtctctactaaaaatacaaaaattagccgggctaacttttttttttttttttttttaggcggaatttcactcttgttgcccaggctggagtgcaatggcatgatctcgcctcactgcaacctccacctcccaggttcaagtgtttctcctgcctcagcctcccaagtagctgggattacaggcatgcgccaccacacccggtaaattttgtatctttagtagagacggggtgtctccatgttggtcaggctggtctcgaactcctgacctcaggtgatccgcctgcctcggcctcccaaagtgctgggattacaggcgtgagccaccgcgcccggccaaggtgggctaatttttaaattctcccagctactcagggggctaaggcaggagaatcgctggaacccggaaggtggaggttgcagtgagccaagatggtgccactgcactacagcctgggtgtcagagcagagtgagaccctgtctcaaaaaaaaaaaaaattaaaattttggctgggtgcagtggctcacacctgtaatcccagcactttgggaggctgaggcgggcagatcgcttgagctcaagagttcaagaccagcctgggcaacatggtgaaaccccatctttacaaaaaatacaaaaattagcggggcatggtggtacacacctgtaatcccggctactcgggaggctgaggtggaagggaggcagaggttgcagtgaacctagatcgcgccactgcactccagcctgggcaacagagtgagatcctgtctcaaaaaaaaaaagaaaagcaaatttaaaaaaaattttttttttttaattgatcattcttgggtgtttcttgcagagggggatttggcagggtcataggacaatagtggagggaaggtcagcagataaacaggtgaacaaaggtctctggttttcctaggcagagtgtttgtgtccctgggtacttgagattagggagtggtgatgactcttaacgagcatgctgccttcaagcatctgtttaacaaagcacatcttgcaccacccttaatccatttaaccctgagtggacacagcacatgtttcagagagcacagggttgggggtagggtcaccgatcaacaggatcacaaagcagaagaatttttcttagtacagaacaaaatgaaaagtctcccatgtctacctctttctacacagacacggcaaccatccgatttctcaatcttttccccacctttcccccctttctattccacaaaaccgccattgtcatcatggcccgttctcaatgagctgttgggtacacctcccagacggggtggtggccgggcagaggggctcctcacttcccagtaggggcggccgggcagaggtgccccctcacctcccggacggggcggctggccgggtggggggctgaccccccgacctccctcccggacggggcggctggccgggcagggggctgacccccccacctccctcccggatggggcggctggctgggtggggggctgaccccccgcctccctcccagacggggcgactggcttggcgggggctgaccccccacctccctcctggacggggtggctgccgggcggagaagctcctcacttcccagacggggtggcagccgggcggaggggctcctcacttctcagacggggcggctgccgggcggaggggctcctcacttctcagacggggcggccgggcagagacgctcctcacctcccagacggggtcgcggccgggccgaggctctcctcacatcccagacggggcggcggggcagaggcgctccccacatctcagacgatgggcggccgggcagagacgctcctcacttcgtagatgggatggcggccgggaagaggcgctcctcacttcctaggtgggatggcggccgggcagagacgctcctcactttccagactgggcagccaggcagaggggctcctcacatcccagacgatgggcggtcaggcagagacgctcctcacttcccagacggggtggcggccgggcagaggctgcaatctcggcactttgggaggccaaggcaggcggctgggaggtggaggttgtagcgagccgagatcacgccactgcactccagcctgggcaccattgagcactgagttaacgagactctgtctgcaatcccggcacctcgggaggctgaggctggtggatcactcgaggttaggagctggagaccagccgggccaacacagcgaaaccccttctccaccaaaaaaaccagtcaggcgtggcggcgcgcgcctgcaatcgcaggcactcggcaggctgagacaggagaatcaggcagggaggttgcagtgagccgagatggcagcagcacagtccagcttctgctcggcatgagagggagaccgtggaaagagagggagagggagaccaaggggagagggagagggagagggagcttaaaaattgttaaattgttatacatttaaggaaaaaacagtgacactggaggggcgaggccagtggaggtgctgtgtgacctcgggcagagccccacccatctctgggcctttggggtccgtctgcgaaatgaattgagggaggcgctggctcagtagtcccttcagggttacctaatcccgcttctcctcccggacttaacggcctactgtctcccctctagtatccattgaaacctggcctaaggtcccagaccttcctttcaactccaaagacccatcctcccaggcagccttccaggctgatcactgtgcctccaactccgtcgttcctgttccgatccccatcacgggctgagggtgaccgtgtttgtttatgaccgccccctccacccacacacctcactgaggtggtggaagtctcctgagccaggctcagaggcggacagtcacggcaggggatgggttcagcggcagcgcattacgctgccacgagagggcgccagcgtcccgcagacgacgcagaggcaactcccgctggagaaactccatgcgacttttctttggggaaactgaagcccagagagaggtcacgccgtcccgtggccacaccgcagctgtggacctgggggtgcccgagcgtcccctgcattcagctctgtggcgggacgggggctgaggatgactggagcaggcacaagggctgcggggaaggtagggtttgccagaggctgaaaattgggaagggaacatcatttcgtaggtaccgctcctgggcgaatgcgccgaggcgcgaccgagtgacggtatgtcaagagcaggttgatgacccgggagcgaggctcttggaggagtccagctggggctgcacgatgatccatgcacaaccttctgaggtcaggactgatttttactttctcccggctctacagaggtggaaactgaggctccaagaggttgtcatttgcccagagccaccagctaagcgggacttgaatcaggaaaggggtgcagcaggcaccagtgtggagggcggtcccacccacctcctccacttctccctttgcatagcgggggaaacaggcctggaacagtcataggctctctggccctcaactggggcgagagtcccccgccccaaatcgggctggacatgcctcgagtcacgtcaacgaggggcggctggtgagtgattaagccgagaggctgaaggctctgctaggtgacctcaggcctgggccctgcctctgcacctctttttttcctctttacccccggggtccgcgagagaccagctctggcagcctaagggcttcagtttctccccggggtccgcgagggaagggggcagccggcggtgagcaggggcgtttgttattttgctccacgcctgggcagagccacgccccttgtcgcgctattggtggagtcccttcccggggcggggaagagacggtgaccccacccccccccgccctgccgtataaaagcggcgccgacgcacggcgcggggattttctgctccggttggtgagcgcgcctgcgcgttgacggcgattttgcgttctgaggctgcagcgtcggcatcttgagctgccggttcgcgagttcgaggccaggttccgcctgtcgtgggttcgcaccccggacgcgatgctattcgacaaggtgaaagcgttctcggtgcagttggacggcgcgaccgcgggcgtcgagcccgtgtttagcggcggccaggccgtggcgggccgggtgctgctggagctgtcaagcgccgcgcgtgtgggtgccctgaggctgcgcgcgcggggccgcgcccacgtgcactggaccgagtcgcgcagcgcgggctcgagcacggcttacacgcagagctacagtgaacgcgtggaggtcgtgagccaccgcgccacgctcctggcgccaggtacggatggaggacccctgctccaacaccagttgtgtgcctcccaccacctggacggcggtacctccgtcagccctgggaccccagcgcaaccgctcagtcgcctcctttttctcctacctgcagataccggggagaccacgacgctgcctcctgggcgccatgagttcctgttcagcttccagctgcccccgtaagtcctctggggtgcagggttgccctaagcctgcagccccttccagattggtacctccaatactggatatctgggcacctctgagccccaagactctccccctgggaggcccccggagtgtctgtgtctccttctccctgcctgcttgtctctgtatcttgtcccctgaagtcccgtccctccaccctaggaccctggtgacatccttcgagggcaaacacggtagtgtccgctactgtatcaaggccaccctgcaccggccctgggtcccagcacgccgggcaaggaaggtgttcactgtcatcgagcctgtggacatcaacacgccagccctgctggtgagtggccacccttggggaggtaggttgggagtattgtaggaaggggcctgcctggctgctgggcgacaccaaccaataagatggaggtcataggtgggccctggcagggagggaggcaggtgtgggaatgcgtgtggaatccactgggatctgcacccatttgccgtgtgactctgggcaagtgtcttgaagccctctctgagcctcagatgcctcttctgtgaaatagaccagagctagggcttaccaagtgtgaattacacaccaaacacttggcttatacatttcatttctggctttataagatgggttgtgttcctggctctatttaacggatagttcctggattgttaaaaagaaaccaagccctgcccaaagtcctccctcagctgggggtggtttggaagctccacagcgactgtggtttgcacaaagtgactcatccatgtcactttcctctacaccgacaggcacctcaagcgggggctcgggaaaaggttgcccgatcctggtactgtaaccgtggcctagtctccctttcggccaagatcgaccgcaagggctacaccccaggtagcaggcggaccggactgggttgggacgggggctggtgttggggttgcaggaggggaaactgaggccccactgctccttgctgcaggagaggtcatccctgtctttgccgagatcgacaacggctccacacgtcctgtgctgcctcgggcagccgtggtgcagacacagacgttcatggcccgaggcgcccgaaagcagaaacgggcagtggtggccagcctcgcgggcgagccggtgggccccgggcagcgggcgctgtggcagggccgggcactgcggatccccccagtgggtccttccatcctgcactgccgcgttctacacgtggactacgcactcaaggtagggcatcctgctggccctgggggacagtgcctacattcaccctgtattccctcagactgggggaagctgaggcctcagtctccccaggcataggagggaggtgggggttggggaggctgcctgggcaccctcccttatggttccttcctccaggtctgtgtggatatcccaggaacgtccaagctgctgctggagctgccactggtgatcggcaccattcccttgcacccttttggcagccgttcctccagcgtgggcagccacgccagcttcctgctggactggaggctgggggccttgccggagcggcctgagggtaagctcccaccctgcttgcatgcagagggtgggtggatacacggagaggtggatgccgggtcaactctctcaccacgagtcccccggaatcccaaccaaaggacatacagcctggcagccccagagctggcacaagccagctcctggcccctggtcccttggagcagggctctctcctgccaacctcacccaccctgtctctcgcttccagctcctcctgagtactcggaggtggtagccgacactgaggaggcagccttggggcagagccccttcccgcttccgcaggaccccgacatgagccttgaaggcccgttcttcgcctacatccaagagttccgctaccgcccgccacccctgtactctgaggtgagctcaggggtctgagaaccacccatgcctctctgggccctgggagccttgatggggtggcagacatagtagatgggttttttttgtttttttgtttttttagacagggtcttgctctgtcacccaggctggagtgcagtggcataatcatagctcactgcagcctcgacctcccgggctcaagcaatcctttcgcctcagcctcttgagtagctgggactacaggcacacgccaccacatcctgctaatttttgtgttttgttttgttttgctttgctttttgagatggagtttcagtcttgtcacccaggctggagtgcaatggtgcgatctcagctcacttcaacttccgcatccctggtagagcgattctcctgcctcagccttccgagtagctgggattacaggtgttagccaccacacgtggctaatttttgtatttttagtagagacggggtttcaccatgttggtcaggctggtcttgaactcctgacctcaggtgatggcctgcctcggcatcccaaagtgctgggattatatgcgtgagctaccacgcccggccaatttttgtattttttgtagaaatgtggtctcactgtgttgcccaggctggtcttgaactcctgggctcaaatgatcctcccatcttggcctccccaaagtgctgggattacaggcgtcagccactgtgcccggctggcagaggattttaattgttgacagaatttcgctacatacagtcggccctctgcgttagctggtttggaatctgcagattcaaccaaacatgggtcagagacatttgaaaaataaatacatacatggataatacagattaaaaatatgataggctgggtgcggtggctcatgcctgtaatcccagcactttgagaggccaagatgggaggactgcttgaggccagaagtataagaccaacctgggtaacatagcaagacccccatctctactgcaaataatacaaaattacccaggcttggtggagcccatctatgattgggaggctgaggcaggaggatcgcttgagcccaggagtttgaggctgcagtgagcaatgattgtgctactacatactccagtctgggagacaaaacaagacctcatctcaatactactactaatagtaataatgcagtataacagtgattaaatagcatttatattttgtgtgtgtatatgtgtatatatatatatatatattttttttttttttttttttttgagatggagtcttgctgtgtcacctaggctggagtgaagtggcacaatctcggctcactgcaatctccacctcccgggttcaagcaattctccctgtcttagcctcccgagtagctgggattacaggcatccaccaccatgcccagctaatttttgtattttttagtagagacggggttttgccatgttggccaggctggtctagaattcctgacctcaggtgatctgcctgccttgacctcccagaatgctgggattacaggcgtgagccaccacacctggccataaagtattataggtaatctagaagagatttaaagtacacgggagggctggatgcagtggctcatgcctgtaatcccagcactttgggaggctgaggtgggcagatcacttgaggtcaggagtttgagaccagcctggccaacatggcgaaaccaggtctctaccaaaaatacaaaaattagctgggtgtggtggcatccacctgtgatcccagctactcacgaggctgaggcaggagaatcgcttgaacccaggaggtagaggttgcagtgagccgagattgcgccactgcattccagcctgggtgacaaagcgagactctgtctcgaaaaataaaatgaaataaaaataaagtacacaggaggatgggcttagattatccgcaaatattatgccattttatatcagggacctgagcatctgtggattttggtatccacggggttcctggaaccaatcccctgtggataccaagggacggtatacactcagctccaaaaccctccttgcaccccagtctgccctagacaccacctcctgatggcctcatccctggtcaagggcgggagttgggagatggctagatggggagcggtatttctgaatttctgtttccagtgttctctgaggcttaatgggaacatttctcttaggaggatccaaacccactcttgggggacatgaggccgcgctgcatgacttgctgaacggcacagggacccctcgaggaacaaggttgcacaccagctttcagccaccatgactgtggggagtggctggaccaagggctgacctccccgactgcatcaaagttggggaaccaagtctcagagtgaggcgggggcctttcggatatcacatgggacagaggaagagcccggctggaatctgacttacctggaccgctgtccttgtgaggcattgaatgcccagtgcagtatccgagagactgtttaataacctgtcttcccagccaattggtggtgctggaatcccctaggagccttcagtctgggagaaacagagccagacatagacagttccagcatcacagaaccagaagaagagacctgcaactgtgagagtccagacaggaagcagagaaggcgtccttgcggaaagggcattttagctgaggctttggagtacgaataggagctcagcaggcagacgaatgaggaataaaggtcagagaaggtcagagctgagtgacgtttggaatccaccccgtttattgtagaactgggggttcagagggcaggtgcctcagagttgaggccacacagtgaggtctggtgggtgaaaggacccaggaacgaggcgttcaggaaagcaggttgtcagagctatgtggagtctgtgggtggcaggggcagccgctccagcctttgaagactttgaaagccagagattcctggcgcaggcttggacttcctgggagctcctccaagtacccaggggcatcagagctgcctgggtgttacatggcccagggaacccaggttcagggtaggacaggcaagaccagatacccaatgtgcaaagtgaaaacactgggctccctgttaaacgatgaagaattcaagacagtgacagcattacgtcacccctggggacagaggtcagcctaaggtgacacacggggactactgtgcttccggaggctccctgtgtcctggaggagaaaagcattagagggggcagctggacaagctcccaactgcagagtcccagccctggctggggcagggccccggcctgggactcagcatttctgatatgccttaagaattcattctgttttgtacaattattttttaaaagtaaacgtgtggagaaagaatccgggcttcttggtttatttccgcccccgatctggctgctgagggaactgggactgccatccctggtcactatcttggagactaaattcctggccaaggaaggcaaaggggctcatgattgagaaggggaaactgaggcccaggactgggagggggttggtccaaggacatatgaggaggctgagctggggtgggagctgagccctgggccccatacctgcaccgcctatcggagtctcagaggctggcgggggctgaacagtggaggacaagcagagaactctatcctcagagagtggggagcagggggctggggctgggaggagccgcctgagtacgggaacatcctgtcatctgagtctaggtttggtttttgtgggtttttttctgtttgtttttgtttttcagaaggagtcttgctgtgtcgctcaggcatagtgtagagtgtagtggtgtgatctcagctcactacaacctccacctcctgggttcaagcgattctcctgcctcagcctccaagtagctgggattacaggtgcctgccaccacacccggctaatttttgaatttttagtagagacggggtttattttttttttctttctttcttttttttttaagacagagtttcgctgtgtcacccaggctggagtgcaatggcttggtcttggctcactgcaacctccgcctcccgggttcaaatgattctcctgtttcagcctcgaaagtagctggaattacaggcatgtgccaccacgcctggctaatttttctatttttttagtagagacagggttttaccatgttggccaggctggtctcaaactcctgacctcaggtgatctgcctgcctccgcctcccaaagtgctgggattacaggtgtgagccaccatgcctagccctggatttgtttttattgaggtgaaattcacatattgtaaaattcaccacttgaaagtattcaatttagtacactttacaatgtagcatttaatactcataatgtttcttttgtttggttttgagatgttctcactctgttgcccaggctggagtgcaatggcccgatcacagcagcctcaagagatcctgggctcaagagatccacttgcctcagctcctcgagtggttgggaccacaagtgtgtaccaccacacccagctaattatttttttgtagagacacgatctccctttgtttctcaggtgggtcttaaattcctgggctccagcagtcctcccgcctcagcctcccaaagtactcggattacagatgtgaaccatcacaaccgacctggctatttacgatgttatgcaaccatcaccaccatctatttccagaacatttctatccctgccaaaggaaaccctgtccccactagtgatcaatccccattccccttcccccacctccagcaaccactttctgtctctggatttgcctattgtgaacatttcatatcaatggaatcatgcggccttttgtgtctggcttttatcactcagcatgttttccgggttcatccacattgtactatgtgtcagaacttcattcctttttctggttgaataatattccattgtgtgcgtagaccacattgtgtttagccattcatccgcggatggacatctgggttgtttccacggcttggctatagtgaatcttgctgctaagaacacgtgtgttcaaggattactttgaaaacccacggagctgttaggtggccctagtggcgtggggctgttattcttctggagttacaggtggggatagtgagctcaagagaaagagactagcctggccaacatggtgaaatcctgtctcttctaaaaagaatacaaaaatcagtgagacgtggtgcaggcacctgtaatctcggctacttcggaggctgaggcagaagaatcacttggacccgggaggtagaggctgcagtgagctgagatcatgccactgcactccagcctgggtgacagagtagtgagaccctttctcaaaaaaaaaaaaaaaagaaaagaaaaaaaaggaaataagaaagaagggagggagggaggagaaaagaagagaaaaaaaaagagaaaagaaaagaaaggggggagggagggagggagagagagagagaaagagaaacaaagggaagaggaaggaagggagggagggagggagggagagagagagaaagagaaacaaagggaagaggaaggaagggagggagggagatgctccacttgggtcccacagtcaggactgagacggccagcactcaaaactgccccttgggccaggcacagtggctcacacctgtaaatcccagcactttgggaggccaaagcaggagaatcgcttgagcctaggagtttgagaccagcctgggcaacatagcaagatcccgactctacaaaaaaaaaaatatataaaaaattaaccaggtgtggcagtgtggacctctagttctagctactcagggggatgaggttaggaggatcacctgagcctgggaaatcgcggctgcagcgagctatgatcgcaccactgcactctagccttggcgacagagtgagatcctgtctcaaaaaaatatataaacactgcctcttagactccagagtccatgccgccctcaggccacatgatactgtgcccctcaagctcctgctgaagctctgcctgtctcacctaagccctcgtgcccctccaaggttgggcaaggccctattgaaaccctagtctgggccgggcgcggtggctcaagcctgtaattccagcactttgggaggctgaggtgggtggatcacgaggtcaggagaccaagaccatcctggctaatacggtaaaaccccgtctctactacaaatagaaaaaaattagccgggcgtggtggcgtgtgcctgtagtcccagctactcgggaggctgaggcaggagaatggtgtgaacccaggaggtggagattgcagtgagccgagatcgtgccactgcactccagcctgggtgacagagcaagactgtctcaaaaaaacaaaaacaaaaacaaaaagaaaccctagtctgatagcccaggctgtcccagccagcctgcccaaggcagcagaaattaactggcaggctggaggctggaatggccattgtcagggctaggagccagggatgaggactgggggacccaggggctggacatgaggagatctgggttaggtagggcttggctctctgtgtgactgcaggcaggtcaccttgcgtctgagcctgttttgtcatctgagactctgggagacagcccatccccacaccctaccacagtcctcaatcacgtccttcctctggcctgagggtgagccctcctttcctgctacccctggttctaaggtctaccaagacctcctttgacctggcatcaagcttggagcatgccatacatgggaggtccctggggccagcagagaggaagcattcccacagcacagtcactagaagccgaactgacagtctcagtaggaaatgagttatttgtcatgcggggtgtgcaagacatatcagtttccagatccatgttcccaaacagaggagagtctaaggtatttattccagcaagggatgtgggtacagtgcgacaaaaagattccacccagcgggggtgggaggacaagacgccccgtgtcctcaggactcctgagtctgcaactatggggaacttgatcctgacagaaggagaactttccggttcagatgatcaacaaccaggattaagctggcccagatagtcccaattcaggaaacttcctgaacatggggaggggcctagggagcccaaaggcaggtggtcaacttctatcaaacatgaaatgaggccgggcgcggtggctcacgcctgtgatccagcactttgagaggctgaggtgggaggatcacgtaaggccaggagtttgagaccagcctgggcaacagagcgagaccccatctctacaaaaaaaaaaatgtaaacattagctgggcctggtggcatgtgcctatggtcccagctactcaggaggctgaggtgggagaatcacttggcccaggaggtctagcctgcagtgagcgatgatcaaaccactgtactccagcctgggtgacgtggcaagaatttttctccaataataataataataataacaacaacaacagcaggccgggcacagtaatcccagcactttgggaggccaaggcgggtggatcacgaggtcaggagatcaagaccatcctggctaacacagtgaaaccccatctccactaaaaatacaaaaagttctccgggcgtggtggcgggcacctgtagtcccagctactccggaggctgaggcaagagaacggtgtgagcccgggaggcggagcttgcagtgagtaagtggagattgagccaccgcactccagcctgggcgacagagtgacactctgtctcaaaaataaataaataaataaaaaataacgaaataacaaaaaccccaaccctctccaggcccgtaagaccccctgcccacctctccctccagctccccctccctccccgtctgctactcaaacactccaagctgatttttatttttattatttttatcttttagacagagcctcactctgttgcccaggctggagtgcagtggctcgatctcggctcactgcaatctccgcctcccaggttcaagtgattctgcctcagcctcccaagtagctgcgactacaggtgcccaccaccatgctcagctaatttttgtatttttaataaagacagggtttcaccatactggccaggctggtcttgaacacctgacctcaaatgatccacctgcctcggcctcccaaagtgctgggattacaggtttgagccaccgcgcccggccctccaagctgatttttaccttggggacttctcatatactattccccctgcgaaaaggctcttcccccattggtggtttctctttaccccctggcctcactttttcagagccactccaacctcctggccaaagttgccaccccctccatcactccctctcctatctctctgttctgtagtcttcctagccctcatcacgctctgaaattactacttagatgttcatttgtttgtctgaccctctgtgggcagggccagatccaggctctgacccccgccccagcatgcagcaggcatgagggtggttgactaagtgactgggggaccactgctctgcctactttgatgtggatgaagactcctctttttttttttttttttgagacagagtctcactctgttgcccaggctggagtgcagtgggttgatctctgctcactgcaagctccgccccccgggttcatgccattctcctgcctcagcctcccaagtagctgggactacgggcgcccaccactacgcctggctaattttttttttgtatttttagtagagacggggtttcacagtgttcgccaggatggtctcgatctcctgacctcgtgatctgcccacctcggcctcccaaagtgctgagattacaggcatgagccaccacgcccggcctttttcttttttttttcttttctttttttttttgagacagcattgtccaagctggagtggaaagcctcgatctcggctcactgcaaactctgccacccgagttcaagcaattctcatgccttggcctcctgactagctgggattacaggcacccatcaccacgcccagctaatttttgtatttttagtagagacagggtttcaccatgttgcccaggctggtcttgaacttctgacctcaggtgatctgcccatcttggcctcccaaagtgctgggattacaggcgtgagccaccatgcccagctcagatgaagattctgatgggggtggaggtgtcatcccttgcacttgctcccaagacctcctagagtcagacgtgtcccccatgcagagtcaaatgctaggtctctatctctcagtgtctctgtctgtttcattctgactctcaccatcttttctttcccatctctgtctctctctcaatatctgtcttgcttactgtctctgtctctgtctctcagtcttattgcctctgtacttctgtctctttctccctgtctctgtctccctctgcctctgattctctcactatctctcttggctaccatctctctgtctctttgggtccctgactctctcaccatctctgcctcctgccctggcccggccagctgggggacaaggggtgacaagcagtcagggcgcccgctgcttgttttcccacccacgctggcagggagcccagcccagccgggccactgttcaggaatcctccagcctccccgctccagccaccaggcgcggccaccgccagcctctcctcccagcacattctgtcccaagcaaagagcgccagagatggggtgggggtgggggtgggagggggacgcattcctgctgagctccagttacaggacagcttgtcctggtggccccaccagcacaacctcctgatggctccccatcctgctgtggggttagaccttcctgaatgaagccaaagcccctctgccagttcgtgcccacctcagggcctttgcaccagccataccttccacctggcactctgtctccctagatctccccaagacctcctccgcctgcacatctgagacctcacatcaccttctcagcaagtcccctctgtccctaggcccgggcaccccaaattcccctcctgctgccccagtgcatttaatttcctggtcctccccatgtccctggggttacatattcacttgtttgttgatgtggtgtctattacaccaggtccccactgtgtcccagcaccctgaacacacagtaggtggcttagtgaaggtttttacaattgacatctattcctcccaaagctcagcccgcccaggctcatccatgtggatccacagttctgaccaccccacctctgcctcaccctgcctccgccacccctgcaccctaatgcagcaggatttcccaagcccccctgccttggcccagggagttatctccaccagatccacctttctgagcgaggagctgggtgcattgaggggcaggggcggctggagttcagatgcaccttttgagcgaggggctgggcctctctgtcgctgggctccaggcacagggcagtcatgatgtacacacacacgtgcaaacacacacgcacacacataagcctgtcagcaacatagaaacaccagccagtgaactcgggcacaagcagccgggcacagagtgttcaccaggtgctcacatgtggagtaccccaactcctaggaggatgcggttatggcctggatcctacaggtggggcccagacatgggctttgaacccacgccagggtatgcacaaacctatccaaacacacgcgtgtctgccctagcttccctcacccgggagtcacccccccaccccccaccttgtttttgatgttcaggaaagtccccagaaagcactgggcccgggcaaggggccaggaggaaatggtgactcagccggtggccatcagtgcctgccacgctgggctgggtggactgcgcggcccgatctgggaggatccacagaaaacaacaataaaagatgagggcgtgggtgcggggtaaaaaggactcagcccaagaatgatcagagaggggatggatccccctgtgctccaacacttcaaccctgctgggcctgattgacaagtggggaaactgagacacagggaacaagtgacttcgccaaggcccaccagccaagatggtacaggcaaggggatccctaagtccttaacacaggggtctggaggaatgtctacctgccctgcccttttttttttttttttttttggagacagggtctcactctgtccgtcaggctggaatgcagtggcatgatctcagctgactgcaatctccgcctcctgcctcagcctcccaagtagctgggattaccggcgcctgtccctatgcccaggtaatttttgtatttttagtagagatggggtttcaccatgttggccaggctggtctcaaactcctgacctcaggtgatctgcccacctcggcctgccaaagtgctgggattacaggcgtgagccacagtgcccggctccctgccccactttctgagacccagatccacttcctggtttcctgtgtggtcatgtgaccacacttggccaattggagccttttgttatcacaggcacagggattgggtcagggctgggcacgtgatcctgcctgagccaatcatgctacgagtttggagactccctggaagaaggcctagaagtaaggaaaaccatcttggacgcatgatgatggcagtggatcagagtcccaaggacactggtgaagatcagagcaggactcacacaacctcagatccctgtggagtcagggtggaaccagagggaaggctgaaggctggagggtcctgagaggccttgcagaaagagaggacattggagctggggctttgatggatgaagaggaactagggaaaggcatttcaagcagagggaacagcctgtgcaaccacagcaggcaggtgggagctaggcgtgtcctcagccaccccagtggccccatggggctggagcatagagaggcatctgcaaatgtgtttatttgtttattgagacggagttttgctcttgttgcccaggctggagtgcagtggcgcaatcttggctcactgcaacctccgcctcccgggttcaagcgattctcctgtctcagtctcctgagtagctgggattacaggcgcacgccaccacgcccacctaattttttgtatttttagtagagacggggtttcaccatgttggccaagctgatcttgaactcctgacctcaggtgatccacccgccttggcctcccaaagtgctgggattacaggcgtgagccactgcgcgtgactatttatttatttttttagatggagtctcactctattgcccaggctagagtgcagtggcacgatcttggctcactgcatcctccgcctcccaggttcaagtgattcttctgcctcagcctcctgagtagctgggattaaaggtgcctgccaccacgcccggctaatttttgtattttaatagagacggggtttcaccatgttggccacgctggtcttgaactcctgacctcaagtgagctgcccgcctcagcctcccaaagtgctgggattacagacgtgagccaccgtgcccggtttaaatgtgtttatttgtctctgtgctcaattctcccacctacaagccccctaagggcaggaccgggtttgctttgttggtggccagcagttgtccattaatgtttgtgatacaggtgaaccaggccacgtgaagccttgaaccggggctgagagccagcgctttcttttggggacacaaaacaggcaggatgggcagggggtggtgaatagaaaagattgggtacataaggcagaagagcctggggctttataggggtggcccctgaagcctgtgacccaggagggaccaggcccaggccacagtccaggcaggagagggcgtgtccccatctgtgaacccccacccccagaccctggccatggtgcttaggagggaggcagcatggagcttcgggtctgggctctgggaccacctcttcctccctgtgtgaccgtgggcaaacgacagcacccctctgagcctcagtttcctcatctggagcttgacttcactgtacgtcagtgtcaggactgggcacagagtgggtgcagcgtctgtggggcagcatgggggtgctgaggcagtgggtgaggggtaggctcgtctggaacatgccgttagcagttcccagcctctttgaaaacaggaaaccggctctcatgggagcccccagctgtgcttcctgagtctccgcgtgacgtgcgcgtgctggggcagtgtgggcaggcatgtgtgtgtttgcgtgtttgcaggcggcctggaatataggtggatccgcctgcgtgtgcatatgtgtgtgtgtgtgtgtgtgtgtcgggccgcacgtggcattgcccagaggcatgtacacacacaaccgttacctgtgctcgcatgtggagctatggatctcagccagtgtgggaagcagacagtgggttggttggggcacttttgagtctgggtctaagtgttaagtctgtgtgtccgtcagcagaggtgactggtgtgtgctgggactgacttgggccggcagagcctgtatcgtggccctaaggcctccgaaaccccaggtcagccctgattcagctgctgatgttggctttatttatttatttattttgagacagggtattgctgtgttgtccaggctggagtgcagtggtgccctgttagcccactgtggtctcgacctcctaggctcaagctatccttccacctcatcctcctgagtagctgggacaacagacacacaccaccacacccagctaatttttgtattttttgtagacatggaatcttactacgttgcccaggctggtctccaactcctgaactcaagcgatcggcctgtctcaggctccaaaagcactgagattacagacatgagcagtggccacttttttttttttgagacagtctcactctattgcccagactggagtgcagtggtacaatcatatctcactgcagcctcgacctcccaagctcaagtggtcctcctccttcagcctcccaaccatctgggaccacagacacaagccaccatgcccggctaacttttttttttttttttgagatggagtctcactctgtcacccaggctggagtgcagtggcaagatctcggctccctgcaacctctgcctcccaggttcaagtgattctcctgcctcagcctccagagtagctgggattacaggcatgcaccaccacatctggccaattttttatatttttggtagagacggggtttcaccatgttggccaggctggtctcaaactcttggagtgatcatcctgcctcagtttcccaaagtgctgggattacaggcgtgagccaccatgcctgtaattttattttttttattatttttatttttgtagagaaacataggtttccctatgtttccagggctgatctcaaaatgagatcctcctgcctcggcttcccaaagtactgggattataggagtgagccaccatgcctggtctacaacaggttcattgtcacctcagggccttttattttttttttcttttttttgagacagagttttgctcttgttgcccaggctggagtgcaatggcacaatcttggctcaccacaacctctgcctccagggttcaagcgattctcctgcctcagcctcccaagtagctaggattacaggcatgcgccaccactcccggctaattttgtatttttagtagagatggttgttctccatgttggtcaggctggtctcgaactcctgacctcaggtgatctgcccgcctcggcctcccaaagtgctgggattacaggtgtgagccaccacgcccggcacctcagggcctttctacgtgttgttctttctgcccagatagctcttcctctcgctcattacaaagcctgcacgttctcttcctgaagatgtcagtttaagcatccactccttagagacctttccacctcttcttgtttcttgtttttttgttttaattttttgacaagagtcttgcaggctggagtgcagtggcgtgatcttggctcactgcagcgtctgcctcccaggttcaagcaattctcctgcctcagcctccccaagtagctgggactacaggcatgtgccaccacagccagctaatttttgtggtggtgttttttttttttttcccgagacggagtgttgctctgtcgcccaggctggagtgctgctctgtcgcccaggctggagtgcagtggcacaatctcggctcactgcaagctccgcctcccgggttcacgccattgtccggcctcagcctcccgagtagctgggactacaggcacccgccaccacacccggctaattttttgtatttttttgtagagacagggtttcaccgtgttagccaggatggtctcaatctcctgacctcgtgatctgcccgcctcggtctcccaaagtgctgggattacaggcgtgagccaccgcgcccagcctaatttttgtgtttttagtagagacggggtttcaacatgttggccaggctggtcttgaactcctgacctccagtgatccacccacctcagcctcccaaagtgctaggattacaggtgtgaaccactgtgcttggctcctttcacctctttcacaaaagctgccctattctccctctcagttccttccaattccttgctttgcctttctcacagtttgtgattacaatgtattgacaggttcacggcctgtcttccacctcccctcggtactgggagctccaagagggcgggtcatagcatgcagtaggtgctcaataaatttactggctgggtgtggtggctcatgcctgtataaagcactttgggaggctgagatgggaggatcccttgaggccaggactttgagaccagcctgagcaacatggtgaagccccatctctactaaaaataaaaataaaaaaaattagccaggcatggtggcacacacctgtagtcctagctactggggagactgaggtgggaggattgtttgagcccaggaggttgaggctgcagtgagccgtgattgcaccactgcactccagcagaatgggaccctatctctaaaataaataaataatataaaaataaatgcagtatgctaaatgagagtgcctgcacaagatgcagagagccaggaatggggaggtggaagacaagggccctccctcagtagctgctcaattagtgtatgatggattaatgaagctcagagtaagaccttgacccactggtcctggactcctaaagaggagtcttctggcctcatccctagcctcctggccccagatcacactgtgtgagcagcccctggagcctgcttggcaggggaggaacagaagtccctgctcagttatttgcacactggcttctcccacgaagtcctaacatcgcaacttcaagtgccctttcctttcagaccccaggcctggaaaggtctttattttggccacctcagcccattgcatggaagggatatccaaggtcagaagcaatcccgtccctgtgtccaggttgagcatgtccctcctctgctcacacaccctccgtggctccctattaccctcaggagaaagtccagctcctcagctcagcagtcacagtccagcctgagtgtggcaagatcatttttcctttgtctaattctcagtcactctttgggtctcatcttggttatgtttcccagtattgaccattgacacagtcccaggacacactaactgctgtcagaaaccaaatgttcattgcattaatcttgtcagaacatcaggctgaatacgacttttattgttgttgttaagagactgtgtctggctctttcacccaggctggagtacagtggtgcaatcatggttcactgcagcctcaacctccgggctcaagcgatcctcccaccttagcctcccgagtagctgggactacgcacactaccacactcagctaatttatttattttttatagagatgaggtctcactctgtcgcccaagttggagtgcagtggtacagtcatggctcacgcagcctcgacctctgggctcatgcgatcctcctacctcagtctcctgagtagctgggactacaggcacacagcaccacacctggctaagtttttttttttttaattttttgtagagacaggtctcaccatgttgaccagcctggtctcgaactcctggactcaaacgattcctccccactctgcctcccaacgtgttggattacaggcatgagccgccacgcccattaggatatgactttttttgtttgttgttttgttttttgagacggagtttcgctcttgttgcccaggctggagtgcaatggcacgatctcagctcactgcaacctccgcctcctgggttcaagtgattctcctgtctcagcctccctagtagctgggattacaggcatgtgccaccacacccatctaattttgtatttatttttaatagagatggggtttctccatgttgatcaggctggtctcaaagtcccgaccttggcctcccaaagtgctgggattacaggcgtgagccaccatgcccggtctaggatatgacttttacagagtaaaaagactcacagtttgcattgcatgtgaccactgtggaccattgactattaacagagtattaaattcaatataaagaacagtgactgcccaagagcttagatcaggaataggcaaacattttctataaagggccagataggaaatatttgaagctttgccggctacacagtctcttttgcaattactctacgctgcggctgtttgaaagcattcatatacacaaataagtgagcatggctgtatcccaggaaaactttgttcatggacactcaagtgtgaatttcatgtaattttcacatgtcatcaaatagtcttcctctggtagtttttcagtcattttaaaatgtaggccaggtatggtggttcttgcctgtaatcccagtgcttggggaagctgaagtgagaggaccgtttgaggccaggagttcaagaccagcctgggcaacatagggagaccccctcctccatccttacaaaaagttttaaaaattagctgggatgcctgtagtctcagctattcagtaggctgaggtgggaggatcacttaagcctgggagttcgaagctgcagtgagctatgatcccgccactgcattctagcttgggtgactgagagagatcttgtctctaaaaaaaaggagggagccagggccggtcatggagaccatcctggccaacatggtgaaaccctgtctccactgaaaatacaagaaagaaagtaaaaaaaaaaaaaaacccaaactagctgggcgtggtggcaggcgcctataatcccagctactcgggagggtgaggcaggagaatcgcttgaacccaggaggtggaggttgcagtgaaccgagatgaaggcactgcattccagcctgggggataagagtgaaacccatctcaaaaaaaaaaaaaaaaaaaggagccaggagcggtggctcacacctataatcccagcagcactttgggaggctggggcaggcggatcacttgagaccaggagttctagaccagcctggccaacatggtgaaaccctgtctctactaaaaatacagtaattatctgggtgtggtcccagctactcgggaggctgaggtgggagattagcttgaacctgggaggcagaggttgcagtgagccgagattacgctgctgcattccagcctgggcgacagagtgagactctgtctcaaaaaaaaaaaaaaaaaaaaaaacggaaaaaaaattgaatactgttttggggtcatggttaaagctgaagtttaccaacccctgatgggtcataagtgtcatgatttgtgtttacagagtatcagaactttgtttaaagttaccagctgataaaatatgaggacaggtttatggctaacagggtttcatcattgacagatagcaagtatcaggattagtcttttttcacaaagtatcagaacacagcaagctctgatggctaatcaggtgtcagaacctgggtttaagtccaaccctgccttggggcccacggcaccgcggtaaccaccaactactgtccactctcaggatactgtttactaagtatcgagtgacaggctgatggcaaagtatcgggtcatggatgtcacactgtgagttgggcactgtgacagcgtctctagatgccagctgtttacagtgacaggagactggctgtttacaggggatgagtcagccccacttccagatacccaagtccagatggcgggtaggattggcacctctccaggtgtttacagggtactgaggtcctggcaagctgggcttctctcctgcggccacctctagccagggtggggaatgagtcccctgaaggctgtgggacccatgatcctggttagattctccttctgcttgtccctggctgtgctgcctcaggcacattacttaacctttctgggcctctgccacctcatctgtaaaatgggcatgatggtgaagccaggttgccagataaaatataggctactcagctaaatgtgaagttcagatcaatattgaatttggttttactgtaagtatatcccatgcaacatttgggatatacttatactaaaaaaaaattattcattgatgctatggtttgaatggtcccccaaagttcatatgtttgaaacttaatcctcaaagcagtcctttcaaccttgtcaacctgtcggcgcggcctctggtgcagtggcggcggctcctgttcctgccgcagctctctccccttcttacctccccaccagatcccggagatcgcccgccatggctttacttactgcggccgcccggctcttgggaaccaagaatgcatcttgtcttgttcttgcagcccagcatgccagtgcttcctccatgaatttgaaagacatattggctgacctcatacctaaggagcaggccagaattaagaccttcaggcagcaacatggcaagaaggtggtgggccaaatcactgtggacatgatgtatggtggcatgagaggcatgaagggattggtctatgaaacatcagttcttgatcctgatgagggcatccgtttctgaggctttagtatccctgaatgccagaaactgctacccaaggctaagggtggggaagaacccctgcctgagggcttattttggctgctggtaactggatgtatcccaacagaggaacaggtatcttggctctcaaaagagtgggcaaagagggcagctctgccttcccatgtggtcaccatgctggacaactttcccaccaatctacaccccatgtctcagctcagtgcagctgttacagccctcaacagtgaaagtaactttgcccaagcatatgcacggggtatcagccgaaccaagtactgggagttgatttatgaagactctgtggatctaatcacaaagctaccttgtgtcgcagcaaagatctaccgaaatctctatggagaaggcagtggtattggggccattgactctaacctggactggtctcacagtttcaccaacatgttaggctatactgatcatcagttccctgagctcatgcacctgtacctcactatccacagtgaccatgagggcggcaatgtaagtgcccataccagccacttggtgggcagtggcctttcagacccttacctgtcctttgcagcagccatgaacgggctggcagggcctctccatggactggcaaatcaggaagtgcttgtctggctaacacagctgcagaaggaagttggcaaagatgtgtcagatgagaagttatgagactacatctggaacacactcaactcaggacgggctgttccaggctatggccatgcagtactaaggaagactgatccacgatatacctgtcagcgagagtttgctctgaaacacctgcctaatgaccccatgtttaagttggttgctcagctatgcaagattgtgcccaatgtcctcttagagcagggtaaggccaagaatccttggcccaatgtagatgctcacagtggggtgctgctccagtattatggcatgatggagatgaattactacacagtcctgtttggggtgtcacgagcattgggtgtactggcacagctcatctggagccgagccttaggcttccctctagaaaggcccaagtccatgagcacagagggtctgatgaagtttgtggactctaagtcagggtaaaactggagactgggggaaagtgactaccagaaagtgaggaagcctaaataaaaagtatacttttgtttcagggggcctttaaagacttaagattaaattatatctgaggcactgataatatgtttgaggttaaaatataaattaagactttaaaagatgaaaaatggtcccttcttccctaatcagctcctttcccctgcctggtatgagttgcccatcacaggcatggtcctggaggatgaccaggactaatgcatgtggtatgagtaggtttggccccctcactatctctagagtgagaatctggctcctgtttccatggctcaaagccggttgcagagaatctgcagtcacttcggagctttagcttcttctctgccaagccctcaataagccagcaaaccaggactctgccccttctgtttccataggaatcatgttggatagtcagctgtaccaagccccttggccttcccatgcacacaaacacctcctagcaagacctgttggttagctggacatgctttggcaatttttttatactgccaagtgaccataaaggcatggcatttgttgtgactggcacccaatgtttgattttttttttaaactatccaattaaaattaaggtctgggagtgttctgtttcccattactttaatactcacccccctcccagactttctacacctgtttcacctcaggctgaggatgttctggacctccccctcttagtccctactagagacctctcaacagatctgtgggcccagtcattgggttttatcagtgcttaatgtgaactaagttttttacttccaacagaatacaagccactaccttctgacctccccaccccccaccaacccccagcttttaatatgctgtggggcatagaacagggactccggaatgaccagcatgatattttcagagtcttgtccctggggtattagcacctctttttgaacagagaattgattcaagattggacatggtctcctctgattatcaggtactggggctgagggcattaaaaatagtaagcctccttcctcgtcccctgcctcaagaaattgcctccttatttatcaacatctttttcctccctttccctgagagctcacagtacaatgtttgtttcagaagccccatttgcacaggttttcagcaactcagaatgctctacttctttttctttgagaaaggattgagatacgctcctgctgtgcccccatctttcctccaaactcctgcctgtgtttgtgtggatacccagtcccagaaccacactgttgagttggacacactgtaaacccctggctaactgtcaagtcatgatgcagacttcaggttgttctgtataaaatgcaaaataaatgttttaattaacaatgaaaaaaaaaatcctcaaagcaatagtgttgagaggtgggacctttaagaggtgattcgatcactggagtgggttcgtcattgtgggaatggatttgttataaaagtgagattggaggccaggcatggtggctcacacctgtaatcccagcactttgagaggctgaggtgggtggatcacttgaggtcaggaggttgagaccagcttggccaacatggtgaaaccctgtctctactaaaaatacaaaaatgagctgggcgcggtggcggacgcctgtaatcccagctacctgggaagctgaggcaggagaattgcttgagcctaggaggcagaggttgtagtgaaccaagatcgcgccattgcactccagcctggggtacagagtgagactctgtctcaaaaaaaaaaaaaaaaaaaaaaaaaaaagtgagcttggaggccgggcacagtggctcatgtctgtaatcccagcactttgggaggccaaggcaagcagatcacctgaggtcaggagttcaagaccagcctggccaacatagtgaaagcccgcctctactaaaaaaaaaaaaaaaaaaaattacccaggcatggtggcacatgcctttaatcctagttactcaggaggctgaggcaggagaattgtctgagccagggaggcggaggttgcaatgagccgagatcgtgccactgcactccagcctgggtgacaggacgagactccgtctcaaaaaaaaaaaaagaaaagtgagattgggctggacacagtggctcacactagtaaccccagcgcaaggcaggaggatccttgagcccaggggtttgagaacagcctgggcaacatagtgagactccgtctctacaaaaaatttaaaaattagctcagtgtggtggtatgcacctgtagtcccagctactcaggaggctgatgcgggaggatcgcttgagcctaggagttcaaggctgcagtgagttatgattgcaccactgcaccccagcctgagagacagagcaagaccctgtctctgttttagagacaaatacatgtctctaatatatatataatatatgaaaatatatatcatatatatagatacatacatgaatatatagtatatatttatagtatatctatgtatagtgagaccccatctctacaaaaaagaacaaaattagctgggtgtggttgtgtgggcctatggtcccagctactcaagaggctgaggcgggaggattgcttgagcccaggaggaagtcaaggctgcagtgagccaagattgcaccactgcactccagcctgggcaacaagagtaataacctgtctttaaatttttttaatgtaaaaataaataaaaatttaaaagaaaaggctggccaggtgccatggctcacgcctgtaatcccagcactttggaaggccaaggcgggtggatcgcgaggtcaggagatcgagaccatcctggttaacacggtgaaaccctgtctctagtaaaaatacaaaaaattagctgagcatggtggcatgtgcctgtaatcccagctactcgggaggctgaggcaagagagtagcttgaacccaggaggcggaggttgcagtgagccaagatcataccactgcactcctgggtgacagagcaagactctgtctgaaaaaaaaggcaaggcaaggcagggaagggcagggaagggcagggaagggcagggcaggcaaggcagggcaaggcagggcaaggcagggcaaggcagggctgtttggggcttcccttgctctctggcgtgtttctcttaccagatgatgcctgcaccacgtgataacacagcaaggagaccctcgccggatatggcccaatcttggacttcccagcctccagaaccacaagccaaataaacttcaattgtttatagattacccagcctgtggtattctgttaccacaaagcagaaagctaagacagttgtttctctgaaatttgaagttaacggggtgcctggatgtgtatttgctaaacctgatccccctgtgatgaagcctcccacatcacaaaaaaaatcttagaaatttaaaacttagccaggtatggtggtgcacacctatagtcccaaactcaggaggctgaggcaggagaatcccttgagcacagaaggtcaaggctgcagtgagccatgatcgcaccactgcattccagcctgagtgacagaacaagaccttgtctctgtcttttttttttttttcagacagaatcttgttctgtcgcccaggctggagtgcagtggtgcgatctcggctgattgcaacctctgcttcctgggttcaaatgattctcctgcctcagcttcccgagtggctgggattataggcgtgtgccaccatacctggctaatttttgtatttttagtagagacagggtttcaccatgttgagcaggctggtcttgaactcctggcctcgagtgatcagcccgcctcagcctcccaaagtgctggggtgacaggcgtgagccactgcgtctggccttcacctttctcttttatccttacttttatttttttttagaccggatcttgctctgtcgcccaggctggagtgcagtggtgcgatcgcagctcactgcaacctggacttcccaggtgcaagtgatcctcctgcctcagcctctcgagtagctgggactataggtgcatgtcaccgtgcaaggctaaaactttttttttaaagagatgggatcttgccatgttgcccaggctggtctcaaactcctgggctcaagcgatcctcctgcctcggcttcccaaagtgttgagattacaagtgcgagccaatgcgcctggccttatcgttgcttttgaggtgagaagatggaggtccagcatccagggccagatttgagcccactgggtcctttgtctctagccttagtagcactggccatgaaatgggactttagccaactgcaggtgaccaagagccaaccttgcatctcaggctgctgggcccctctgagctcagccccgggggcttgttgcaggaaggcccctcacttttatttatccccccacccccactgtatatgtaactgtctgaaactcactgttaaccccataaggaaaaatgtgctggctgggcaccatggcttatgcctgtaatcccagcactttgagaggccgaggtgggaggatcacttgaggtcaggagttcgagaccagcctgggcaacatggtgaaaccccgtctctactgaaaataccaaaatcagccgtacatggtggcatgtgcctgtaatcccagtgtctcaggaggctcaggcaggagaatcgcttgaacccgggaggcaggggttgcagtgagccgcgatcacacgactgcactccagcctgggtgacagagtgagaccccgtctcaaaaaaaacaaaactcattcaactgtactttattggatataagttacaccttaatacacttgactcaaaatttatgtatttaatattttattttgagaatgtgagaaaaaaaaaagtaacgtaagaataaaatccaggccaggagtggtggttcacacctgtaatcccagcactttgggaggtggaaggatcacttgagcccaggagtttgagaccagcctgggcaatgtagggagaccccccatctctacaaaaaaaaattttttttaattaaccaggtgtggcggtggacactcagaatgttacagaatggttcttgtgactaggcctttagtcacagctacctgagaggctgagatggaaggatcacttgagcccagaaagctgagcctgcagtgagccgtgatggtgccactgccctccagcctgggcaacggagtgagaccgtctcaagaaaaaaaaaaaaaagaaggccaggcgtggtggctcacgcctgtaatcccagcactttgggaggccgaggcaggtggatcacctaaggtcaggagtttgagaccagcttggccatcatggtgaaaccccatctctactaaaaataacaaaaattagccggacatggtggtgggcgcctgtcctaccagctacttgggaggctgaggcaggagaatcgcttgaacccaggaggtggaggttgcagtgagccgagatcacgccattgcactccagcctgggtgacagagtgaaactctgtctcaaaaaaaaaaaaaaaagaaaaagaaaaagaaaaaaattcaaatgctttatacaaagtcttctgttttggaaaactcgtgttattagttccagctctggaatgatgaagagtggtctcttgctacataccctagctatccagatgtgtctgttcatgttctttttcttgcttcaaaataaaacacatctgtgttttaagttacaagtattaacttgctatattcaaagaattcatgaaacatatgtgagcataccattaaagaaacacagaaaaaaaggagaaagcagtcaatttatttatttattatggagacagggtctcagtctgtcacccaggctggagggcagcggtgcaatcatgactcactgcagcctcgacttcctgtcctcaagcgatcctcccgccttagcctcccaaagtgctgggattacaggaatgagccaccacacccagccttaaagcagtcagtttagaagtggagatagtatgggttacagccatactgaatcaggcaccatggctccggttccatgcgtaatagccctggaactatcaatctggataaaacagtcctttttatttattttttttggtagagatgggatcttgctatgttgcccaggctggtcttttttttttttttttgagatggagtctcgctctgtcgcccaggctggagtgcagtggcatgatctcagctcactgcaagctccgcctcccaggttcacgccattctcctgcctcagccgccccagcagctgggactacaggtgcccaccaccacgcctggctaattttttgtatttttagtagagacggggttttaccatggtctcgatctcctgaccttgtgatccgcccgcctcagcctcccaaagtgctgggattacaagcatgagccaccacgcctggcctgcccaggctggtcttgaactcatgggctcatgcaatcctcctgcctcagcctcccaaagagctgggattacaggtgtgagccatggtgcccatcagtctgagacatacagatgcgtgcctcagtttcctcacctgtacaatgaggttcatcacccccttgcacatggggtcattgtgaggacagggtgggttgggcctggtgcagtgggcattgtcagagcgggagaaataagtcccaggttggatttagtgtcttttgtcttctcagctgtgttcatttgttttacactggtgtgagccaacctaaagtctcactctgacatcttgtcatcatccaaatggccaactgctaatcatcaagcacttccctgccagcgcagcgaggcagcagcagtgatgtcccaggatcagccagttcctggtcacatctcattgcacacctgcccctttgaaatgtccagtcctggggctgcttagattctagaacaatcttgggagcgaggagcccaggccagggtggcatcctgtggtcttgatcccaataccatgctgttccagggtcacttggaagctggactcagtatcccagtcggggagctggtggctcaggcaaagggacgcagaggagccctgttgcagactcagcaatgtggccctaagggagctgggtgcagcgcagtggcccacgcctgtcatctcagcactttaggaggccaagtgggaggatcacttgagcccaggagttcgagactagcctgggcaacatggcgaaacctcgttgctacaaaaatacaaaatagagccgcgtgtcgtggttcgcccttgtaatcccagcactttgggaggctgaggagggtggatcgcctgaggtcaggagttcgagaccagcctggccaacatagtgaaacccccctctctaataaaaatacaaaatattagttgggtgtggtggtgggtgcctgtactttcagctacttgggaggctgaggcaggagaattgcttgaacccaggaggcggaggttgcagtgatccaagatcatgccactgcactccagtctgggtggcaaagcgagactccatctcaaaaaaacaaaaaaattagccaagcatggtggcatgcacctgtgatcctagctactcaggaggctgaggcaggggaatagcttgaacctaggaggtggaggctgcagtgagccatgattgcgccactgcactccagcctgggagacagagtgagaccatgtctttaaaaaaaaaaaaaaaaaaaaaaaaaaaaaagcagaaatagcagctgtgagaaaatatagtagaatcaggaacgtagtggagaagaaatcatctggtgccatggaagttcaggacagacccctgcatcaagaaagaggagactgtgccactgcactccagcctgggcgacagagtgagactccatctaagtaaaaaaaaaaggttgggcacggtggctcacgcctgtaatcccagcactctgggaggctgaggtggatggatcatgaggtcaggagatcgagaccatcctggctaacacggtgaaaccccgtctctactaaaaatacaaaaaattagccgggcgtggtggcgggtgcctgtagtcccagctactcgggaggctgaggcgggagaatggcgtgaacccaggaggcagagcttgcagtgagccgagattgtgccactgcactccagtctgggcgacagagcaagactctgtctcaaaagaaaaaaaaaaaagaaaagaaagaggaataaaggaatcaaaaagtgtttccaactctgcagggaaagacacaaactgtattaagagagattaatgatgcaagatggatgtccaggacacacctgctgggagccacagtggcttaactccactgtctgtggggacttggaggtcatggcaagcacagcagtgaaattcctgcaccaggagggggcccgggccatggatgaggagttgtttcatgagtaccagcatggcccaacttacagaactggctggactcagctgttccactgtcattgccaaggcatatcctcccatatccatgtcccgatcatccatggcccagggaataatggagaaggtagcctgctctgtgcttgacacctcaaacattttggtcaccagccaatcatctttgaccccaaaagacccaacaagccactctacactatgcttggtgacccactgtcaggaaaggggcattcttttgcttggtgaagtgcccccagagcccacgctgatcaatgagctgtatgggctgggggtggatgccatctttggcttcagcttcaagggcaatgtttgaaagccattctgtaacattctgagtgtcctgaatagactcactgtgccactgccaatgctgacattcccttgggatgggacatggagaaggaaaactccggagggatccagccagacctgcttctccccctgatagcacccaaaaagtctgaaacctagtttacagattgctaccactacttgaggggttgttgactaccacctgcttgggaaaagaagtaccagctaaaacctgccattgtaccctaaccctgagtatgtctcatcatctgcagtgaaggaaggtggatggacattcttcccaataaagacttagtgcctctgtctcccagaaggcacacacacatacacacacacacacacacaatgcggagagagactactgaggctaaagagatggtaggcataccatgttcatggacaggaaggctgaggttcataaagatgctgattaactcatttaacagtcccaacccaccagaaggaaccaatcttgcagagaccttgatttcagacttctagcttccaaagctgtgacagaataaacatattaaattaatttccccctctgtagtttcaacacagtcccaatgaaagtcatgtcagagctttccctggaactcaatatgataaccgaaacatttaactggagcagcagagggttgcaaatagttgggacattactgcagaagaacagggcagtcctacctgacataccagatattggaaccatgacaaagcctgtaattaagtcagcaaaatactggcacagaaagaagcacattgaccaatggattagaattaaatgcccacagacagccctatgcaggtcaggaattttgcttcaagaaggagagagtctgtcccagcagtggggaggggaggctatcccataaaaggatctgggaaatgggagaccatgttgaaaacaatattggttctctacttcacacaatatgcaaaacaaaactccacatgggttaaggagttacacacaaaaatataacaaaattaacctttttattttatttttttagacagggtcttgcttggtcacccaggctggagtacactcactgcagcctcaaacttacaggcgcacattaccacgcctgactattctttttaaattttttttgtagagacagggtcttgctatgttgcacaggctagtcttgaactcctggtctcaagcgatgctcctgcctcagcctcccaaagtgctgggattacaggcatgagccactgtgcctggcccaaaagaaagctttaatgtcttggtggtaaatataggtgaacttgagggcaaggcttggcggctcatgcctgcaatcccaacattttgagaggccaagaggggaggatcaattgagcctaggagtttgagaccagcctgggcaacatagggagactccatctctacaaaataaaatttaaaaattagctgagtgtggtggtgcatcctgtagtcccagctactagagagggtaaggtgagaggactgcttgagcttggaaggttgaggctgcagtcacccatggtcacaccactctactccaggctgggcaacaaagtgagaccctgtctcatagaaaaaaaaaaagagagagagagagaaaagaaaatattggcgaacttggggtaagaaaagactttccacataagagccaatgggcattgtctatataaagaaaagattggttaatttgcatatattaagggtaggactttgtattcatcaaaaggcacattgaaggaagtgaaaagacaagttaccagccagccacagtggtccacatttgtaatctcagagctttgggaggctgaggctggaggaatgcttgagcccaggagttctagaccagcctgggcaacatagggagaccccatctctacaaattaaaaaattagctggacatggaagtgtgtacctgtagtctcagctactcaggaggctgaggcaggagaattgcttgagcacaggagtttgaggccgcagtgagctatgatcatgccactacactccagcctgggccacagagtgagaccctgtctccaaaaaaaaaaaaaaaaaaaaaaagaaaaaggccaggtgcagtggcttacacctctaatcccagtactttaggaggccgaggcaggcagatctcttgagttcagtagttcaagaccagcctggccaacatggtgaaaccctatctctactaaaaatacaaaatttagctgggcatggtggcgggcacctgtaatcccagctactcgggaggctgaagcaggagaatctcttgaatctgggaggcggaggttgcagtgagccaagaccacgccactgcactccagccggaccacagagggagttttcacctcaaaacaaaacaaaaagactagttacaaattaggggaaggtatttgcaatatactcaacagatggaggaatactatcaaacctacataaataattcctataatgccatccaggcacggtggctcacgtctataatcccagcgctttgggaggctgaggtgggtgaatcacctgaggtcaggagttcgggaccagcctggccgacatggtgaaaccccatctctactaaaaatacaaaaattagccaggcatgatggcaggcacctgtaatcccaactactcaggtggctgaggaaagagaatcacttgaacccgggaagcggagattgcagtaagctgagatcatgccactgcactccagcctgggtgacagagtgagactcagtctcaaaacaaaacaaaaagacaagttacaaattaggggaagatatgtgcaatatactcaatggatggaggaatactgtcaaacatatataaagaattcctataatgaacaccacaaagaacacagagtaggaattcacgaaggaggaagcacaagtggcaaagagatgatcaacatttactgaggatcaggaagatgcaaattaaaacaccaggtagatgccatttgattggcaaaagctacaaaatccaccaataccaagtgattccccaagatgtattcatgagaaactcacaaatggctgtgggagggtgcatgctgctgacacttgggaaaaacctctggagtttccaagtgtctctgagtccacaacccacatgctccagaaatccgcaaagagaaataccttcctgctcctggccagagtgccggaggtaagcactaccctctcagacctggaggacctgcaggaggacaggtgagtttttacttggggttggagagggggctgtgtaagtttcctggggctaatgtaacaaatttgcacaacctggggggctccagacaacagaaatttattctctcccagttttggagagaagtctgaaatcaagataattgcctgggttgattctttccagtggtttgagatgtttaaatgagctaatacctggtacacactaaacacttagtaccagtgtactgggagaataataaaatgcaggaatacagcaaagcataaaataagcattgattgttgattggatgagtgattaagactaagtgaagggccaggtgctgtggctgatgcctataatcccagcacttttggaggccgaggagagcggttcagctgaggtcaggggttcgagaccagcctggccaacatggcaaaaccccatctctaccaaaaatacaaaaattagctgggcgtagtggcgcatgcctgtaatcccagctactcaggaggctgaggcaggagaattgcttgaaccctgggaggcggaggttgcagtgagccgagatcacgccactgcactccggcctgggtgatggagtgagattgtttcaaaaaaaataaaataaaataaaaaataagtggaggctgggcgcagtggttcatgtctgtaatcctggcactttgggaggctgaggcaggcagatcacttgaggtaaggaatttgagaccagcctgggcaacatggtgaaaccctgtctctactaaaaatacaaaaattagccaagcgtggtggcgtgtgcctgtagtcctagctactttggaggctgaggctgcagtgagtttgaacctgggaggcagaggttgcagtgagctgagatcgcgccactgtactccagcctgagcgacagagcaagactcttctcaaaaaaaaaaaaaaaaaagactaagtggagatgagggttcagtgcacccccatctcctggccctgctgcccatgagccagaccctgagctgacagattggtgcccatttcctcttatggattgatacggggctcttacctctgggtttgctcagcccagcagcaggcagtcagagccagaagttgtttgcaaaccgaaaccggtctgcggcttgggccacctacttgtgaaaccagctgtcgctgtttttcctccctgtgagaaagtcccccagtaaagctgcgcgggggaggagaaggagggtggaggagggccgagtagcttcctgggagaccttggggtgtggaggcgctgctctggactttggtttgcccatctgcaactgggcaccatggggaaaggggattgcaggctcctggctggggagtttggatttggggatgctggacaagtgacttcacctctctgagcctcagtttccttatctgtgaactagtgagaaacacatggccaccagagctgctgcaaaggggcatgtccctctcttcattcaggccttggccccaaatgtcgcctattccaggaagccctccaggactgcctgatcaggaaacaccctccctctgctgcatctggtcatgtattctactttattcatcacacttttcaacacctgattccacattacagatgcatcgcttcaggtgcataatgtcctctgggtcccacctttgtccccagaccatgagtcctacaagggcaagattgctctcagttgtccccggctgtgtccccagaccacagcccagggcctaaagcacagcaggcatctggggaaacatttctttttatcagcataagattattatctgtgagcacactcattaagccccggctgtgtacaggagccagcgacaccaccatgaatgagatacaaattcttttttttttctttctttttttttttttagacggagtctcattctgttgcccaagctggagtgcagtgtggcacaatctcagctcactgcaacctccacctcccaggctcaggtgattctcccgcctcagcctcccaagtagctgggattggtagctgggactacaggctcccaccaccacacagttaatttttgtatttttcagcagagatgagatttcaccatgttggccaggctggtcttgaactcctgacctcaagtgattcgctcacctcagcctcccaaagtgctgggattataggcatgagtcaccgcgcctggcagagatacaaattcctgatggcagaggagggagagagagtgtgggtgacgatgacaattgaactgagacccaaaggaggtaggggagacatatgggcgtctctgggaagatggtccccgggaaagcacagcctttagacaggccccgaggcaggagcctgtctgactcaccggaggagcttggaggaggctgaggtggcctaagtcgattaagcagggtggggagggaagaggcgatggtgccgtgagaccaagcagggccttgaggtctggggggagaactttggcttttactctgaggaaggtgggagccacagaggcttctagacagaagaaggacaagccggactcaggataccagggtgggggtatctgtgggggataaagggagaagcgaggagaccacagaggggtgccactgctggtcctaaggagcaatgatagtctggaccagggagaagggaccttcatgagaagggatcggatgtgggagcaattttgatggtggatgggtggaggaagaagattcaggggcaccagtgtgagcccatctcacaagggaggaaactgagactctggggacagagggatctcagtaaaggagaaactggaagaaaccagtggaacgttcagaggtgaccagggtccaggagggagcccccgcacctccctgagtcacagagattgccagcttcctcctgatgcaacctgaccttccatctctctctttgtttgtttgtttgtttgttttgagacagagtctcactctgtcacccaggctggggtgcagtggcacgatccctgctcactgcaacctctacctcccatgttcaagcaattctactgcttcagcctccaaagtagctgggattacagatacacaccaccacactgggctaatttttgtatctttagtagagacggggtttcgccatgttggccagggtgatcttgaacccctgacctcaagtgatctgcctgtcttggcctcccaaagtgctgggattacaggcgtgagccaccgcacccggcctctctttgattttatctctataatttccatccctgtcagagggaagaggctccaccacctacagacaccgataggcctgactcggcttcccacagattcatttactaaccccaaaccccaagacatgggtaccaacactgttttacagatggggaaactgaggctcatataggcgaagtggttttccaggcagaggcaggattagaaccctgagccttggctctagacccctgctcttgagatggcactctgctgggggtcatcaaacattccaccccgagatgcattattcctttcccagcttctgagaacttgggcttgggtgggagccccctgcaacgtgctaaaaatccaggtttaggcatttttttaatgtaaaaaaatatttacttatcatccaggcacggtggcttacgcctgtaatcccagcactttgggaggccgaggtgggcagatcatttgaggtcaggagttcaagaccagtctggacaacatggcgaaacctcgtctctactaaaaatacaaaaattagccaggtgtggtggcgcacgcctgtaatctcagttactacagaggctgaggcaggagaaatcgcttgaacccaggaggaagaggttactgtgagccgagatcctgccactgcactccagcctgggcaacagagcaagacttcatcacaaacaaatgaacaaacaaaacttatttattttctagaaacagggtctcgctctatcacccaggctggagtacattggcatgatcatagctcattgcagcctcaaactcctggactcaagcgatcctcccacctcagcctccctgagtagctgggactacaggcacctgccaccatgcccagctacattttttcaattttttggagagacaggatcttactacattgcccaggctagtctcgaactcctgggctcaaacaatcctacagcctcggcctcccaaactgctgggattacagccttgagccaccaaccttggccagatttagatttgtatggccttacgtttctgagtttgtaagattatatacgattcatttgttcattcatgttcattcattcctggccacatccaggtgcctgccttatttggggtaatgctcgaggccccagcttgggaaggtccaggctggatagagatattcttgttcccacagggtcaaggctaggctggagggaggtacccagggctgggggtccccagcgatccaggaagtggggggcttgctgaagaagggaacctcatgccaaaggcctgggtcccttcctcctcatgcccaccacccccatgacgaaagccagagaggatgagggcaatgtggggcttccataccccaaatatgatcctggtgcctggtatggaaccccagagcctgccaccgtgtctctagtgatccttgaaaagttccagcatattttgggagtactcaacaccaacatcgatgggtggtggaaaatagcctttgctatcactgccattaaaggtgtggatggaagatacgcttatgtggtgttgaggaaaacagacattgacctcaccaagagggcgggagactcacggaggatgagatggaatgagtgatcaccattgtgcagaatccacagcagtacaagatcccagactggctcttgaacagacagaaggatgtaaaggatggaaaatatagccaggtcctagccagtggtctggacaacaagctccgtgaagacctggagcaaccgaagaagattccggcccatagagggatgcaccacttctggggccttcatgtctgaggccagcacaccgagaccattggccgccatggccgtacctgtaccgtgggtgtatccaagaagaaataagtctgtaggccttatctgttaataaatagtttatggccgggcgcggtggctcacgcctgtaatcccagcactttgggaggccgaggtgggcggatcatgaggtcaggagattgagaccatcctgctaacacggtgaaaccctgtctctactaaaaatacaaataattagccaggtgtggtggcacacgcctgtagacccagctactctggaggctgaggcaggagaatctcttgaacccggaaggcagacgttgcagtgagctgagatcatgccactgcactccagcctgggcgaaagagcaagactgtcgcaaaaaaacaaatagtttatataccaaaaaaaaaaaaaggaagaggaaaaaaaacctgagcccaaagcctagccctaaacgtcacctccggtccccattcccggcttgcaccgggcagcagccaacaccacggggaagtggcctgggcttcccgccagactgcctgctggaaaactagctctgggaggtgggggtgtcaccatccagtatgtgagggtggaaccttctgggctgaccatttatgggacaggcccctagaatgggaggcccaggacagccggagagccacagagcccagcagctggaccagggtgaccatgatgccactggggctgggacacctgcacgagactcttcaggaataagcccctatttccccacctaaaaatggaagtggggccgggcacagtggctcacgcctgtaatcccagcactttgggaggccgaggcgggtggatcacttgaggtcaggagttcgagaccagcctgaccaacatggtgaaaccccgtgtctacaaaaatacaaaaattagccaggcatcatggtggggggcctgtaatcccagctactcaggaagctgagggaggagaatcacttgaactgggaaacagaggttgcagtgagcagagattgtgcccctgccctccagcctgggccacagagcgagactctgtctccaaaagtaaaaaaagagacaaataaacagagaaacaaggagagacagaggcagtgagagacagagacacagagagatacacagggagacacagagacaggtgaaacagagacagagagagatgagacagaaacacacagagagacagacacagagaaacagggaaagagagaaagggagacacagggagacagagacagagagacagaagtgagacagagagatgagacaaagagacagagagagagacagggagagagatgagaaatgagataaagagaaagatgacacaaatattttgggaggctgaggggggaggattgctggaggccaggaattagagaccagcctgggcaacataatgagacccttatctctacaaaaagaaaaagaaaaaaaaagatggcaaagaaagagacaaggagagagacagagagacaaaacacaaagatagagagagaggggcacagggagaaagagacaaagaggggcaagacaagccaggtgcgatggctcactcctgtaatccaagcactttgggaggccgaggagggcggattacctgaggccagagagttcaagatcagcctgaccaacatggtgaaaccccgtctctactaaaaatacaaaaattagcatagtagggtggcgcacgcctgtgatctcagctacttgggaggttgaggcaggagaatctcttgaacctgggaggtggaggttgcagtgagccaagatcacgccattgcactccagcctgggcaatagagtgagactctgtctcaaaaaattaaaaaaaaaaaaattaaaaaaaaaaataaaagcaagtcagagaaatagagacagagagacaggaagagatgagaaatgagagatagggagagacagggagggaggaaggaaataggaagctgggggtggggccaggacacagtggctcatgcttgtaatcccagcactttgggaggctgagatgggaggactgcttgaggccaggaatctgagaccagcctgagcagcagagtgagtgctctttctacaaaaaatacaaaaattagctgggcttggtggcacacacctgcggtctcagctacttggaaggctgaggtgggaggattgtttgagcccaggaggctgcagtgagctatgatcacaccactgcactccagcctctgggtgacagacagagacagtgtctcaaaataaaacaaaatgaaaattagccaggcatggtggcgggcacttgtaatcccagccactcggaaggctgaggcaggagaatcgcttgaacctgggaggtgaagattgcagtgagccgagatcgcaccagcctgggaaaggagagcaaaactccgtctcagaataataataaaataaaataaagatcactcctgtttagttggttaagaagaaaaaaaaaagaggttaggggtacaagaccagccactgggagaagagggccctcctacccggccagaggagccccctgcctggagctcctgatcccagcacataaggtttaatattattaaaggtgatgatatcttggagggttgggcacctcgttcacctagctccttctcacctctcataggcctccccggggggttaactaccccattgcaccgatggggaaactgaggctcggagaagccctggctgcacaggcagttggaagcagagccaggactcggctggatccttgagacgtttgtcgactgactgtgtgacccttggcccctccagtctccaacccggaggagaaacccgcccctcttcccgtcccccacccccagcccgcccggcgggtgttttttttttcctcctcctgggtattttggtttcggcaggaaccgccccggggagcaggcggttcccgctggcagggtcagcccagggcggggacgggagccaggagcagctccaggccagggaaggtggggaggactcggggaggaagcctggccgtggccccgaccactgggaccaggcaggtcgcgtccccatcccaatcttccggtgcctcagtttccccacctggaaagcggggctctgcgtgatcgcggcacagcccgtggaggcgcgtcgcgcatggggccgggcggggtttccacgtctccgccaaggttctgtccactcagttattaaacattgatggatcggggacagagccagaggccagtgccccaaaccggggcgggaggtggggaggggaggaggggggagggacaggccagaggtgggggctgggggcggggaggatggggagaggtgcccgcaagaggggtttatcaagatcaggaggattctcaggtagcacacccaaagcacaagccagcaaaggaaaatagatcaacccgactccacacaatgcaagacttttcttctgcaaggccactattaagagaggcctggcacagtggctcacacctgtaatcccagcactttgggaggttgaggcaggaggatcgcttgagtccaggagttcaggatcagtctggacaacatagtgagatgagaccttgtctatacaaaaaatatttaaaaattagccaggtgtggtggtgtgtgcttgtatagtcccagctactggggaggctgaggtgggaggatcgcttgaacccaggagttcgaggctgcagtgagctatgattgcgttgctgcactccagcctgggcaaaagagggagactctatctcaaaaaaaaaaaaaaaaatgacaacccacagaatgggagaatatatgtgcaaattttgtatctgataagggtcaaaaagataaataatccagtcagacatggtggctcacgcctgtaatcccagcactttggaaggctgaagcgggcagatcactcaaggtcaggagttcaagaccagcctggccaacatggtgaaacattgtttctactaaaaatacaaaaattatccgggcatggtggctaacgcctgtaatcccagctacttgggaggctgaggcaggagaatcgcttgaatctgggagacagagattgtggtgagccaagataacgccactgtactccagccttggcatcagaacatcaaaaagaagaagaaggaggaggaggagaaggagaaggataagaagaaaaaggaggccaggcgcagtggctcacgtctgtaatctcaacactttgggaggctgaggtgggagggttacttgagctcaggagttccagaacagcctggccaacatggtgaaactctgtctctagtaaacatacaaaaattagccgggcatggtggcaagagcctgtaatcccagctacttgggaagctgaagcacgaggatgatcgcttgaacccgggaggcagaggttgcagtgatccgagatcacgccactgcactgcagcctgggtgacagagtgagatcctgtctcaaaaaaaaaaaaaaaaaaaagaaaagaaaaaggaaaatagcaagtgttgatgaggatgtggagaaatttgaacccccatgccttgctggagggaatgtgaaatggtacagctgacgtggaaaactttggcagatcttccagaagttaaacacagaattaccatatgactctgtgattccactcctagatgtatacggagaaaactgaaaacaggtgtttacgccaaaacttgtacacaaactctcagagctgcgctatccacaatagccagaaaatggaaaccaccgaaatgtccattgatggctgagtggataaataaatagtgacacatccacacaatggaatgctattcagccatcaaaaagaacgaaaccctgacacacactataatgaggatgcgtttcaaaaacatctgagtttctttcacaaaagaacagacagaaaggccacatattgtatgatttcattgatatgaaatgcccagaacaggcaaatccatagagacaggaagcagattagtggctgccaggggctgggggaggggaacggggagtggctactgatggcacaggttttctttttggggagatgaaaatgttctagaattaggtatgagtgatggctgcacaaccttgtgattgtacaaaaaccactgaattgtacttttttttttttttttttttgagacagggtctcactctgtcactcaggctggagtgcagtggtgcaattacggttcactgcagcctcaacctcttgggctcaagtgatcctcctgcctcggcttctcaaaatgctgggattgcaggcatgagccaccacgctcagtgtcaactgtacactttaagagggtgaattgtatggtgtgtgaatgtatcttaaaaaaggaggaatggccgggcgcagtgactcacgcctgtaatcccatcactttgggaggccaaggtgggcagatcgcctgaggtcaggagtttgagaccagcctggccaacatggtgaaactccgtccctagcaaaaatacaaaaattagccatgcatgcttggtggtaggtgcctgcagtcccagctactccagaggctgaggcagaagaattgcttgaacccaggaggtggggttgcagtgagccgagatcacgccactgcactccagcctcctgggcgacagagtgagattccatctaaaaaaaaaaaaaaaaagaggaataaggctggggctcagtggctcgtgcctataatctcaacagtttgggaggctgagacaggaggattgcttgagcccaggagttcaagattggtctggacaacatagcaagactctgtttctactttaaattttttttttaaatgaaagaaatgagttaaaaaagagagagagagaaatgggcagagggcagagttggaagaagggccttcctgggcagagggcctggcatctggggcacagataataaagtatcaggggccaggccaggggctaccctgagtccaggggtcatctcctgcagctcatggttcccagaaacctgacacctcagtcccatcccggctgaagggcagaggcagagacaacatctgtttctgaccaaacccagaggctactggagagatagagaaggaaggtacctgggaaggtaaactgaggcagcctatctctctgatggagacacgcttcccacccagtaggtgggagccatggagaagggaaaagatggatcaggaaagacagagacagaggaggggaggtgggaagaggggcaggggctctggagaggctgcctgaccacatccattttatggaccagaaaactgaggcccacaagatgaatcacttactcccagctgaactgcagccagaataaactctgaacctctcacccgtcaggacctgactctccagctccaggaccccacaacccaagaataaaaccctagcccgccaggcgcggtggctcacgcctataatcccagcactttgggaggacggggcaggcggatcacgaggtcaggagatcgagaccatcctggccaacatggtgaaacaccgtctctactaaaaacagaaaaagattagccgggcatggtggcgggcgcctgtagtcctagctactcgggaggctgaggcaggagaatggcgtgaacccggaaggcagagcttgcagtgagcctagatcgcgccactgcactccagcctgggcaacagagcgagactccatctcaaaaaaaaaaaaaacctagcccacgggtacagtggctcacgcctgtaatcccagcacattgagaggccaagacaggaggatcacttgagcctaggagtttgagatcagcccaggcaatatggtgagactctgtctctacaaataatcaaataaactaagctgagcgtggtggcacgtgcctgtggttctagctgcacaggaggctgaggaaggaggaacagttgagcccgagaggtcgaggctgcagtgcgctgtggtcacgccactgcactccagcctgggcgacagaacgagaccccatctcaaaagaaaaaaaacagctctggtccatatgcccccagcctcacgtgggctacaacctcttcccccatcccccgtccattccccaccagcaacctcagggcctttgcactccctcttctggcccctctttaccaccttggtcctagcattgcctcctccaggaagccctccctcactggctactcctcacatccccactcatcactcttacggtttctcataactctctgagtgataattagattagtgtctgccttccccacccagctaagagccccttatgaccaggaagatcctgacttgtgcaagatggggcctggtatacagtaggcactcaatgctggctttttttttttttttttttgagacagggtctcaccttgtcacccaggctggagtgcagtggcgcgatctcagctcactgcaaccttgacctccccaggttcaggtgattctcccacctcagccctcagcctcccaagtagctgagactacaggcatgtgccaccaaacctggctaatttttgtatttttagtagagacggggtttcaccatgttggccaggctggcctcgaactcctgagctcaagcgatcggcccgccttggcctcccaaagtgctgggattacaggtgtgagccaccgcgccggaccctgatttcttaaatgaatgaatgaaactgagctgtgaaatgggggctaacaccatcctgactcctggagctgctgggagaagctgaggcaatggctgctctgaggagccctggagtaatagttgcatagcagttgctcaataaataccaggccagggcccagctaagcaaacttgctgggcccattgagaaaaggactccaaatcccttcctattttatagacgggtaagcagaggcccagaaagaacctcctgttggtcattttctagggacagaagaaggactcaaagtggcttcatcaaacagggaactgaggccgggtgcagtggctcatgcctgtaatcccagcactttgggaggccaagtcaggtggatcatttgagctcagcagttcgagaccagcctgggcaacatggcaaaaccttggcaacaaggcttgagcctgaggctgaggctggaggatcactcgatcctaggaagtggaggttgcagtgagccaagatggtgctactgcactccagcctgggcaacagagtgagaccctgtctcaaaaaagaaacaaaaaataaaaaaaaatatttatttatttatttatttatttatttattttttgagacggagtctcgctctgtcgcccaggctggagtgtagtggcacaatctcggctcactgcaaccacccccttccaggttcaagcgattctcccgcctcagcctaccaagtagctgggattataggcgcttgccaccacgcccagctaatttttgtatttttagtagagacggggtttcaccatgttggccgggcttgtctcaaactcctgacctcaggtgatcagcccgcctctgcctcccaaagtgctgggattacaggcgtgagccaccatgcccggcctaaaatattttttaaaaacaggaaccagatggaaaatattgggtttcaggtatggctggatccaggaactaatgcttcatctcggtgctgctgtcctccctgcaggctcctctctcagacaggcatccccacggtaggaaggaaagaggctccaagctccaggcttccctctgtccagctcagtctcccgctagtggaagcagggtgtgcatcttccccatgcactctggcaaaagtcccagctgctgccagtaaacattgcctgtctcctacttctcgcacccaagggactgtgcataggggtgggtttgcagccaactccaggggcctccagggctcacacctgcaatcccagcagtttgggaggccgaggcgggtggatcacttgaggtctggagttcaagacgagcctggccaacatggtgaaaccctgtttctactaaaaatacaaacacattttagctggtcagggtggcgggcgcctgtaatcccagctacttgggaggctgaggcaggagaatcgcttgaacccgggaggttgccgtgagccaagatcgcgccattgcactccagcaacaagagccaaactccgtctcagaaaaaagaaaggaggataaacgctcaagggagggcatgcctggtggagggaacggcttgagcagaagctgggatgtggcagatccggagcggggcggggggcatttgcagaactctgaccagccaccgtgtggctggggcaccgagatccaggcctctgtttccctatctagatgcatcgatggggaaagggaggcccccagaccaaaggggcggggcctgggcctcttgcctcctggccctattggctgccaggggtctctccccgagaggtctcatcctttttttgccacaaaattcagtagttctgggctttttaactcccctcctctgtctgaaaccggaaaagtctgtttagcaaacgcggtgggaggaggcagggcgggcccggccggggaaacgcgcgccgctgttgccacctggtggccatggggagaatctggactacccgctaatcgccagggctggggtgggatttcaggagcccccccccacacctcggctcagaccgcagtggggatcagggggaggcggctgcagaacgcgagggaggtggggcagtgtgggcagaaagagggaggattcagggtgtgtaaggggggcaagggtcctgctgcgagttggtgggcgtgaggaggaaggagcgtgggggcaaaccacggttcctgttaccggagtgcccggctgctccactccccctaggccgtcccttcccctgctcagtcctaacttagtagggttccaagctctcatccggctctgtctcccccggattaggtgctcctggaggagacctagaggaagagattaataaatatatgtggaatgaatgaatgaatgaatgaatgaattccaaggctcgtgttttgagattttgagcaggacattcaagcttcaaacaggaaaaaaatacccaagaggaggctcatttacgatgattttgaacagctgtgtaaggtcattatcaccacccccattttataggggggtgagggtggggtggggggtgggatgggaggaccgtcatttttcccacaaagtttacagcccccttccctatatgcctggatcctccaagctacaagaccccgcaatgctgcagggagcccttgagtccagactccccatccagtgctcctgggggtggatgcccagcccagggtccagggatccatctgagccccccttgcccccattcccagtccattctacgccagaacaggtaaatggcagggtctgctcctgccccacggatgccaggcccagcagggtgcagcagcttccatttcatggcagcatctagggttcccccgcaggatgggtggcaacaggcacggggcagagaggaggcaggtgcactggagcctggaggagctctgggttatttgggtccaaatgtgactcctgtgtgtgctacgtagcctcgggcgagtcactcaccctctctgagcctcaacgatcacatctgtaaagtacaacagtcatggttcctttcagggggtggttgtagggatttggtagggaatcatgtgagtggatggaatgggctgggtatgccataagtgcttaataaccagccgttgtgattgagatagtcgctcttcgtgtctgtaagacaaagtggatgttttcgtttctccctcaggcctccaggccctgatatcccaggagcgatggatgtctagcccccccaccccccgggcagggttgcacccctgaccgtctggcccactgggccccaggaccttggccttgcacctgtctccatcctccaaggacaactctgtatccagggccagctcaggggcaccctcaggtagctctgtcttctcgagaggctcagtcctctcgcctttgtcccaggacatctctaccaccagggcctcctgcagggatgcctcttcctggaagtccactgggttgatccactgccaagtctgcagagggagggtagggccacagctgtgagcagagctctacttcccatccacagcaggatggaacggaccaggtcactgctggttaaattctctaacatcctgagacctggacgggtgcagtggctcacacctgtcatcccagcactttgggaggctgaggcgggtggatcacttgaggtcagcagtttgagaccagcctggagaacatggccaaaccccatctctactaaaaatacaaaaattagctgagcttggttgcgcacgcctgtaatcccagctacttgggaggctgaagcaggagaatcgtttgaacccgggaatcagaggttgcagtgagccgagatggcgccactgcactccaggctgggtgacagagcgagactccatatatcctgagaccgatttgaggatggagtctgccgcactgactcccattcagcccctcttaggaagagcactcccatctgtctttgggaaatttccctccctcttttcacagatggtgtggttgacagtgcagtgaccccacctcagctctagcaatggtcatgtgaccctggccagcccacccatcagacccttccctacccctctggttctagccataggctcagggaagggcatgtgacccaagctggaccaatcagtgatggccctgagacttttgccccagttaatggggaaaatggacaccctgcttccaatcagagaaggctcagcctgcctgcggaagaaccctgaacgggcagctccgagatagaccccaatcgctggattcaggcatatctgaagcccattcccttgggattttttccatcaggtttcctttataataaagccactttgaattctgtttctagtgccaggaaatggacctctgcctgcctgtctttaaaatgggaaggggtatggagcactggttttggagtccttaccttgatgaattgggagagaataaaatgagctaatgcgtaacccttgtccagcatgtgcacccaataaaaagacttggaattagaaaaggcatccttacctccttccctccagggaactcaatggcggagctggcacagggtgtgggcagcggcgggcacaggtgccgtgcggccctggggaggaaaggggaccagtgagaggagctgaggttttttttttttttggagacggagtcttgctctgttgcccaggctggagtgcagtggcgcgatctcggctcactgcaacctctgcctcctgggttcaatcgattctcctgactcagcctcctgagtagctgagattacaaacgtgtgccaccacacccggctaatttttgtagttttggtagagagaggtttcgccatgttggccaggctggtgtccaactcctggcctaaagcgatctgcctgcctcagcctcccaaagtgctgggattacaggagtgagccaccgtgcccggcttgaaagcagctttcaatcagacatgcccaccagtgtcaccgcccctttccatgggaatgaccaaggacccaaaagttactatcccttccctagaaatttctgcataggatcacctgaggtcaggagttcaagaccagcctggccaacatggtgaaaccctatctctactgaaaatacaaaataaatagctgggtgtgatggcacgcacctgtagtcccagctacttgggaggctgagacaggagaatggcttgaacccgggagggggaggttgcaataagccaagatcgtgccactgcactctagcctgggtaacagagtaagactccatctcaaaaaagaaaaaaaaaagaaagaaattttgcataaactgccccccttaatctgcatgcaattaaaagtaagtataaatctgactgcaaaaccgctctcagcggctactctccgcctacagggaagccctgctctgcagaggcagtcacggagctataactgctgcttcaataaagctgttttcttctacctctggcttgcccttgaattatttcctgggcaaagccaaggacccaatctgcgggctaagctccactttagggctcccctgcccagcatcattaccatcgctatggtaacggtaagaggtgtcagttacctgttcaggccaaggtagccaaggacgcccacgagaaggatgctcaggaagctccccagggaggcgaagaagatgagccaatcagaaacctgcacttctgaggtgggagagcgtgggttggcagagggctacctcctgcctcttcctcagggaaggagctaggagggcctggtttctccatgaacttgctgctgatcctggtgcacatgccacgggcttctcactgggagaccacagaacccacctgcccggtagctgtcaagaaataaaggcctggcatgcaggaagtgttcaagactctgtaattccaggccgggcacagtgactcatgactgttatcccagcactttgggaggccaacgtgggctgatcacctgaggtcaggagttcgagaccagcctgaccaatatgatgaaacctgtctctactaaaaacacaaaaattagctgggcgtggtggtgtgcgccggtaatcccagctacttgggagggtgagacagaagaatcgcttgaactcgggaggcggaggttgcagtgagccgagatcgcatcattgcattccagcctcggcaataagagggaaaatctgtctcaaaaagataaaaaaagactctgtaattccaggagcctgcacatagggcacatgtggctgcccctggacccaggcctgcctgccccccaccaaccctgactcttttgttctctgggttccagttggttctcttggaactgaaaggacaccgtggcatgaacagggatcatttgatctctgaatctcttataaccatgcacccgacaacagagcctgtgttgttctcttcctcctcctcctcctcctcctccctcttcttctattcctcttcctcttcttcttctttcttctccttcttcttcttctatttttttttttttttttttttttttttttttttttgagacagggtcttgctccgtcgcccaggccagagtgcagtggtgcagtcacggctcactgcaaccttgaactcctggtctcaagccatcctcccacctcagcctcctgagcagctgagactacaggtgtgcaccaccacaccccactattttaaaaatattttttgtagagatgaggtctcaccatgttgcccaggctggtcttgaactcctcggctcaagcaatcctccagcctcagcctcccaaagtgctgggattacaggtgtgagccaccacaccgggttttgcctgtgtcctccttatttttgcattcatttatttgtcgctcaatgaacagattcctgcatcttcctcctccccaagagcccccagataccttgacacatctaccccaaccccgcagtgtcagaccagggagaagggacagttgtaaacaagggcatggccagaaggaggcagagaagtcttgctggaggagggaacttttgagctgagttttgaaggacgaataggagttggaccgtgtggaaaacaaacattccaggcaggaggcagggaagggcctgcatgggcaaggctcctggagtgtgagaggaagctgcgagagaaggcaatgggagcagtttgagctgctactttctcctgagggcagtagggagccatagagggagtgagagtgagggcagggctgctaagatcattgtgggaagcgcagtgcagtgcatgctgggtaaataactgggtcctaccccctccactcaccgatgctgaagcgctggggctggctccagacacccctcagccacgctgtgtctgctcgcacctgcaccgtgtaggctacaccagcccgcaggccactgagggtaacttgggtctctgtgggctgcacgggatgctctgcagtgggagaggcaaccctgagtcctgggacctctttactcctcagaggccaggctgggctaccacagcctgtgggtggggtggggattcataggcattttgctaaaatctctactctttctttctttttttttttttttttttgagacggagtcttgctctgtcgcccaggctggagtgtagtggcgccatctcggctcactgcaagctctgcctcctgggttcacaccattctcctgcctcagcctcccgagtagctgagactacaggcgcccgccaccacgcccagctaattttttgtatttgtagtagagacggggtttcactgtgttagccaggatggtctcgatctcctgacctcgtgatctgcccacctcggcctcccaaagtgctgggattacaggtgtgagccaccaagcccaacctaaaatctcttctcttaatgcgcccattcatctcaagattttttttttttttgagatggagtctcactctgttgcccaggctggagtgcagtggcacaatctcagctcactgcaacctccacctcccaggttcaagcgattcttgtgcctcagcctcctgagtagccgggattacaggcgcccaccaccatagccagctaattttttgtatttttaatacacatgaggtttcaccatgttggccaggctggtcttgaactcctggcctcaagtgatccgcccgcctcagcctcccaaagtgctgggattacaggcgtgagccaccgcgtccggctgacttgttggatctttgggcaggtggatctgaggttggaggcaggattggactctggaggcagggcttggacacaggaccaaactgaggactagctaaagcaggtcctgggctttccataagacacgcccaccagtgtgccatgtcagtttaccattaccatggcaacacccggaaattaccgcccctgtccacggcaatgatcccacaacccggaagttactaccttcatcctagatatttctgcataaaccgccccttcatttgcatataattaaaagcgggtataaatatgagacgtagctgccctgcctgtggggcgtccccactctgcaaggagcaggacttctgctgctgctctacacggccacttcagtaaaagtttctgtctaacaccaccgacatgcacttgaactctttcctggggaaagccaaaaaccctcctggctaaaccctgttttgtgggctttcctgtccctcatcagatcccccctccaggccttagtttcctcatctgtggaatggagacagtcatccctgcttgatgagagttcagctgctgctacatgtgaggggcagcttcccatggatgaatccaatacaccataagcacttggctggtgcccacccagccttctccagggtctgcaaggggtgatcgagaccctcaagttcagctgggtgctcatgactaatcccagcactttgggaggccaaggtgggaggatagtttgaggccagaagtttgaaaccagcctgagcgaggccggacacggtggctcacacctgtaatcccagccctttgggaggccaaggcgggtgattcacctgaggtcaagagtttgagaccagcctggtcaacatggtgaaactccgtctctgctaaaaatacaaaaatttgccaggcatggtggtgggtgcctgtaatcccagctacttgggaggctgaggcaagagaattgcctgaacccgggaggcagaggttgcagtgagctgagatggcgccactgcactccagcctgggtgacagagacagactccctctcaaaaagaaaaaaaagaaaaaatcccagcctgggcaatatagcaaggcctcatttctacaaaaaataaaatattaactgtgcatggtggtgtgcacctgtgtttccagctactagggaggctgaggtgggaggatcgcttgagcccaggaggttgaggctgctgtgagctatgatggcaccactgcactccagcctgggcacagagtgagtccctgtctataaaattaaaaaaaaaaaaaaaaagaccctcaagtctaattctcttgtttttgttttttgtttgtttgttttcgtttttgttttttctgagacagagtctcactctgtcacccaggctggagtgcactggtacaatctcggctcactgcaatctccgcctcctgggttcaagcgattctcctgcctcagcctcccgtgtagctagaattacaggcatgtgccaccatgcccggctaattttgtatttttaggagagacggggtttctccaagtttgtcaggctggtcttgaactcctgacctcaggtgatccgcccgccttggcctcccaaagtgctgggattacaggcgtgagccactgcgcccagccaattctcttgttttaagggtttgataaccaaggcccagagaaggacggcaaggtgcccagggtcacacagcaagagagatcacaggccaggatcctcccttcctccccaagccaggtctgcactgcctcacgtacctgacacctgtttgctgtcttcatctcggcagcggacaacatactcctttaggacgccgggacaggtgctcagcagggatggtgcccagtccacagacacagagtccaagctatgattcttcaccgagacgtggtgcggtgtcccagctgctgaggctgcaaccagtaccattgtcatagtcaacaccaagaatgctggtcgaggcctggcacagtggctcgcacctgtaatcccagcactttgggaggccgaggtgggtaagtcatttgaggccaggagttcaagaccagcctggccaacatggcaaaaccccttctctactaaaaatacaaaaattagccaggcatggtggcggacacctgtaatcccagctactcaggaggctgaggcaggagaatcacttgagcccaggaggcagaggttgcagtgagccaagatggcaccactgcactccagcctgggcaacagagcaagaccctgtctttaaaaaaaaaaaaaagcccagccacgatggctcatgcctgcaatcccagcatattgggaggccaaggtgggtagatcacttaaggtcaggagttcgagactagcctgaggaacatggggaaaccctgtttctactaaaactacaaaaattagccaggcatgatggtgggcgcctgtaatcccagctactcggcaggctgaggcacgagaatcgcttgaacccgggatgcagaggtttcagtgagccaagatcgtgccactgcactccagcctgggccacagagagtgactctgtctcaagaaaaaaaaaaaaaaaaaaaaaaaaggagtgctggttgagcacttcctgaatgcccagcctcccactgtccagagacggaggtaacattggccacagagtcaggtgagctgggttttaattctggttctgccactcagtcactgtcatttcccttccctgggcctcagttttcttatctataaaatggacaatgctggccgggcgcagtggctcacacctgtaatcccggcactttgggaggccaaggcaggtggatcacgaggttaggcatttgagaccagcctggccaacatgctaaaaccctgtctctactaaagatacaaaaaattatccaggcatggtagtgcacacctataatcccagctactcaggaggctgaggaaggagaatggcttgaacccgggaggcagaggttgtatgattgcagtggtgcaatcatagctcactgcagcctcaaactcctgggatcaagtgatcttaccacctcagcctcctgagtagttgggactacaggcacatgccaccatggctggcaaacttttttctttctgtagagacggggtcttgctatgttgcccaggctgttcttgaactcctgggttcaagtgatccacaagcctcagcctcccaaagtgccaaagtgctgggattacaggggtgagccattctgtctgccttaacagcattgtccttttttttttttttttttttttttttgagacagagtcttgctctgtcacccagactggagtacagtggcatgatctcagctcactgcaacctccgcctcctgggttcaagcgattctcctgcctcagcctcccaagtatctggaattacaggcacccgccaccacacccggctaatttttgtatttttagtagagacagggtttcgccacattggccaggctggtttcaaactcctgacctcaggtgatccacccaccttggcctcccaaagtgctgggattacatgcgtgagtcactgtgcccagcctctatttttttaaattatttaaaaagaaaaaataatgtaaacctgcaggtttgggtcacttaccattgcccccaaagtggtaggtggacaggaccgtagaccacaaggtgagcttctcggggtgcgcagaggcaaagatggtaatgtagtaacacttttcctgccccattgccccagactctcgactccagctgtaggttgctggaaggataagcaaaggccaggccattcagtagattgtgttcccacctctgcacctttgcactggctgtgccatctgccaggaacccccagaaaactcctactcatgtttcaaagcccttgcaccaatatcccctcctccaagatctcttccctatgcaacacccccaaccccatccccatccccctctaacccagcccttactccatggaaccagggcttcttttttttttttttttgagatggagtctcgctgtgtcacccaggctggagtgcaatagcgcaatcttgactcactgcaatccctgcctcccgggttcaagcgattctcctgtctcagcctcctgagtagctgggatttacaggtgcacaccatcatgcctggctaatttttatatttttagtagagacagggtttctccatgttggccaggctggtctcgaactcctgacctctgttgatccacctgcctcagcctcccaaagtgctgggattacaggtgttagccaccttgcccggacaatggggtcaggggttccgtgtccagttctgtctcctcaggctgtgtattcttcaaggaacaggctgaggctgaggctttctggggctctggcaaggcccagagcaggaagcgggagagtgagaggccacctgagcctcacggcccccctttccctaaagactgctcattaatttgccaccagcatctcgcgaactgccaccttccctggcgcggttgaatatttaacaaacaccttgggatgtgagattcattacctgtatgtgtgtgatctgcctggaactgagctcaggatgccagcaagaggttccagacccatatgggtgagaggctccgaacctcaccctgtccctacctctgtatgacattgagtaagcagcaacacctctctgggccttagacacccgctgtgtgccttccctgcaggtttgaacccaccaggacctaaaagggagggcacagaggaggggtaggcgcaggccattccaggccattacccattccagccggatccgggtcttgcggcgcagtcaggctgcaggtggcaaggcccccgtcctggcccacaggctgccattcaatgcaatacgtcatgctctgagcccgggctggccaatacatggtggtcccgttggttccgacgctgatattcagagccactggttctggaaggagaggggagagacgcatcgagacagttgccatctctctccccagtccccttctctggctcctgcagcctctctcccaccctctcgtctatacccctgaccctacagggccaggggtgtctgtgtttggctgtttccctgcactggaggctgccttggggccaggcacaaagtgggtagcagatggcgtttgtttttttttgttttttctttggagacggattcttgctctgtcgcccaggctggagtgcagtggcatgatctcggctccctgcaacctcagcctcccgggttcaaatgagtctcctgcctcagcctcctgagtagctgggaccacaggcatgcgccaccatttcctggctaatttattattattttttggtggagatggggtttcaccgtgttgcccaggctggtctcgaactcctgacctccagtgatccacctgccttggcttcccaaagtgctgggattacaggcataatccgccgcatccagtcagcaggtggtgtttgaatgagctgagtcctcctccagcctaactgctgtctccttgccaggatattcaccatgagagcttcctgtactgccattacacccacttccagccttgtaggcgtctccggctgtggcagatacctggctgcccaccacttgcctagcctaggcggagagtgtgatgcaagactaggcctccctggcctgaccggcgccactggtggtctcatgccaaactcagaagcacgagcacacacccactcagtccctgggcaaatctctcccactccctcccgccagggcgtcttcatgaatgtcagagagatggatactgcttgcaattctggggatagcaacagccgtttattgagtaccaactgcatgtgccaagccaatgctgagagctttacaggcaccatttcactatgatatgggaccaggctgggtacggtggctcacgcctgtaatcctagcactttgggaggtggagatgggtggatcacttgagcccaggagttcgagaccagcctgggcaacgtagagagacacctgtctctacaaaaaataaaaataaaaaattaaccaggtgtggtggtgcatgtctgtagtcccagctactccagaggctgaggtggaaggatcacttgagtctgggagttcaaggctgcagtgagccatgattgcactccagtctgccaacagactgagaacctagctcaaaaataataaaaatagtaggtcggccacagtggctcacacctgtaatcccagcactttgagaggctgaggtgggtggatcacctgagggcaggagtttgagaccagcctgggcaacatggtgaaactccatctctactaaaaatacaaaaattaggctgggcatggtggctcacgcctataatcccaacactttgggaggccaaggcaggtggatcacttgaggtcaggagttcgagaccagcctggccaacgtggtgaaaccccgtctctactaaaaatacaaaattagccgggtatggtggcagatgcctgtaatcccagctactcgggaggctgaagcaggagaatctcttgaatctggaaggcggaggttgcagtgagctgagatcatgccatctgtcacaagaaaaaaaagaaattagatcttaaataaacacagggtcaactctagccttttttctttctttctctcttttttcttttttgaaaaagagtgtagctctatcaaccagggtggagcgcagtggctcagctagtttttgttgttgttctttaataatgcataatagccaggtatgatggcacatgcctatattcccagctatttgggaggctgagggagaaagattgcttgagcccagaagttcaagtccagcctgggcaacatagcaaaactctgtctcttaaaaaaaacaaaccaacaacaacaaaaaactgcattatggatcttgattattgaattttttttttttgacacagtcttgctctttgttgcccaggctggagtgcaatggcacaattttggctcactgcaacctctggctcctgggttcaagcgattctcctgcctcagcctcccaagtagctgggactacagccaccacactcagctaatttttgtatttttagtagagactgggtttcaccacgttggccagactggtctcgaactgctgacctcaggtgattcacctgtcttagcctcccaaagtgctgggattacaggtgtgagccaccgtgcctggctgattactgaatttttgatacacccctaaatcaggcactcctttaaaattttctgcctcgctcctctcaccctggtctagctgaggctcagagtaggtgctcagctctgaggggccctcataccgccctccccacccagaggaggcacctgtgtgggtgtcggcaggaatgtgccacgtctggttcaggccaggaccaaattggttcgaggagatgacagccacgttgtaggcagcacccgagagatagggcatcttccccaggtgcagggtcctggtggccttggccttacacgggcaggacagcatgtggagctgtagtcggtaagtgacctccgtgccaggcgccagcccttgacagccttctggaagctccagctgggttggctgtcaggagtatgaaagacagcttgtgggtacctgatcacactcatcatcccataggcagacagcagggcacagcctatgaagacagacttggacaaaggccacagccaataacatgcatcaaaaattaaaagaataataaacctcaatgctggcaaagctgctgtgagacaggcattcacctcccgcacacatctagcttgagggaggtgggaaattgacaaaacccactgacattcaggaaaacaaaaatgtttccatcttttaacccagttacctcaagcagaaaatttttccttagaaaaggaatttgagaggccgggcacgggggctcacgcctctaatcccagcactttgggaggccgagacgggtagatcatgaggtcaggagattgagaccatcctggctaacacggtgaaaccccgtctctactaaaaatacaaaaaattagcccggcatggtggtgggcgcctgtagtcccagctactcgggaggctgaggcaggagaatggcgtgaacccgggaggcggagcttgtagtgagccgagatggcgccactgcactccagcctgggcgacagagcaagactccatctcaaaaaaaaaaaaaaaaaaaggaaaaaaaagaagaggaatttgagttagaggaacataggaaataaaggatttttgctacagccttatagtaacagcccattagggacctgactaagatgactatggtaaagtcaacgagtggagtatttgtcagttttgtctcaacagagatactccctctatgcctcagtttccctctctgtaaactaatcagactgcacttaatgggttgttttgggacttaaagcaataatctgctacccaggcaaatgcagtcaccattatctccttcctggccttctggcttctgtgcaattcccccacactctgtttctcacacaggagccagggaaagtctgtgaacatctgagtccagtcatgtgcctctcctgctcacacacacactccatggctccctattaccttcagagttaaacccacaatttgcccacttcctgccacctctacatctcatctccctccatctaccacttgctcatcccccgcctaggcttttgcctcctgctccccatcccaggccaccccacagccctgtgacagccccgttacctgctctttcagggtcagccgcctcctcccatcctggcccagctgctccaccgagaatctcacctgaggctgtggggggttttctgcaatcagaaccaaaccaactagacgaattggaaggagagaaagactgatggatgttttctttgtaaatgatggattctccacatttacaaagtgaaaatcccttgctgccccaaattgcagaaaagagaaaaaactgaaggaagaaaaattaacacaatttgcatccccagggataactgccacctgtaatctcatgttgcctaaggttttttgtttgtttgtttgttcgtttgctttttgagacgaagtctcactctattacctaggctggagtgcactggtgcgatctcggctcactgcaatctctgccttctgggttcaagcgattctcctgcctcagccttccaagtagctgggattacaggcatgcaccaccatgtccggctaatttttgtatttttagtagagacggggtttcaccatgttggtcaggctgttcttgaactcctgaccttgtgatccacttgcctcggcctcccaaactgctggaattataggcgtgagccactgcgcctggcctctaagttcctttttgaatgcaaatgtatttctctgcatggttttgttgttgttgctgttgttttatagactagagacagagtctcgttttgattcccaggcttgtctcaaactcctggcctcaaacaatcctctggcctcggcctcccaaagtgctgggattacaggcataaaccacagcgccaggcctttctgcatggtttgaaaccctctcactcattttcctgttgcccaggctcagggcagcagctgtttagtacaccctgccacctgcaggtgacattgtccttgagacaccgtgaggttcagcctgatgattctcacttgataaagccctgtagtgggctgagcgcagtggctcatacctggaattctagcactttgggagaccgtggtgggaggatcacttgaggccaggagttcgagaccagccgggcaaacatggcgaaaccccatctctactaaaaatacaaaattagctgggcgtggtggtgcatgcctgtaaatcccagctactctggaggctgaggcaggagaatcgcttgaacccgtgaggcggaggttgcagtgagccaagatcacaccactgcactccagccagggtgacagagcaagacagtctcaaaacaaaacaaaaaatagcagtaggccgggcgcggtggctcacgcctgtaatcccagcactttgggaggccgaggagggcagatcacgaggtcaggagattgagaccatcctggctaacatggtgaaaccccgtctctactaaaaaatacaaaaaattaaccgggcgtggttgcagacacctgtagtcccagctacttgggaggctgaggcaggacaatggcgtgaacccgggaggcggagcttgcagtgagccgagatggcgccactgcactccagcctgggtgacagagtgagactccgtctcaaaaaaaaaaacaacaaaaaacaacaaacaaacaaacaaaaaaaacagcagcaaaaaaccctaaagtgggtgcagcaagaccggatgccacattgtcagggtttgagcacccatttctccctctgccttatttctaacactcaccaccttgtttctaatacctgctgccttatttctttttccattttattttattattacttttttttttttttttacttttttttgagacagagtctggccctgtcacccaggctggagtgcagtggtgtgatcttggatccctgcaacctccacctcccgggttcaagggattctcctgcctcagcctcccaagtagctgggattacaggctcccgccaccacgcccagctaattttcgtatttttagtagagaaggggtttcaccatgttggccaggctggtctcgaactcctgacctcaagtgatctgcccgcctcagcctcccaaagtgctgggattacaggcatcagccaccacgcccagccccattttattttattttttagagatggggtctcactatgttgcccgggctggtctcaaaccactggcctcaagtgatcctcccgcctcagccttctgagcagctggaactacaggtgtgcaccaccacctccggctgttgccttatttctaatgcttgcccctgttcctgtactcagagtgatcttaccagggggaacgcacacggggctgctccacttgctccaggaacttccttggctccccagctgccgtcgtcggagctggaattcctgggccacattcatctccagggggcagaggcaggactctggggagaggcaggtcgaacatcaggccgtaagaattgtccaggacttggcaccagtcacttaaccatcatgtgcttattgagctccaactgtgtacagagccacgtgctgggtcctgggggctcagcagaagcaggccaggccctgtcctcttagggcctccaggatcacccacgtccatccctgcccctcagttcaagtcctggctgcggccatcccttcggtcgtgaccttggccaaaggcttctcaccccctccaagtcgtgatttgtttccccacctgcaatttggaaagaatccaatactgaactatggggcagggtaagaggcatacaaaaaaattcagcattggacctggcatacagtaggtgctcaattaatgccaatttgctgcagctgttgttgtcattactattattattctcaccagtatcatcatcctgaggtccgcagtcgccctagaataaaaacatattcatatattgttttgcattttggtgctgaaaaatatttgctgttttacaattagttatttatttacttatttatctgagacacggtctcactctgtcatctaggctggagtgcagtggtgcaatcatggcttattgaagcctcaacctcccagggctcaggtgatcctcccgcctcagtctcctgagtagttgggactacaggcatgcaccatcacactcagctaatttttgcatttttggtagagacgggatttcaccatgttgcccaggctggtctcaaactcctggcctcaagcaatcccaccccaactcggcctcccaaagcactgggattacaggcgtgagccaccgcacctcgctaaatttttttaaattaaagaccatacttccagggattatttctatcgttaattactagagaaccttctctaggttcaaaccttctttaggaacatataaagcagtaaaaaattattataactaaattttaaaaattaataattattttactaaacacaatgtgggatcctggattgaatctgggagcagaaaaaagacattcctggaaaaattggtgacattcaaataatgcctggagtttatgtaagacattaacattagaggagtttgggtaaaggatatatgggcgttctctgcaccagtttatatagtaacttttctgaaaatcgaaggttattccaaaagaaaaaatttattttaaaaaattttagtgggagcaaggcgtggtggttcatgcctgtattcccagcactttggaaggccaaggtgggcggatcacctgaggagtttgagaccagcctggcccacatggcgaaaccccgtctctactaaaaatacaaaaattagctgcgtgtggtagtgggcgcatgcctgtaatcccagctactcgggaggctgacgcaggacaatcgcttgaacccgggaggcagaggttgcagtgagctgagatcatgccactgcactccagcctgggcgacagagcaaggctccgtctcagaaaaaaaaaaagaaaaagaaaaaaaccacctcaggggctagagtgggggctggttgggagcggggacagatgcagagatggtgagactgatttgggggtgaaggtgccctggagaggcccgtgtccaccctggacttgggaaacaaactcaccaacttccatgggctgctgggtgtccggtgccggaactgcacctcagcaccaacctggttatccggggtctcccactccatacgcagctgcccggccaacttggacaccttgatgtctcccagaggaggctcatatttaactggaagcagaggtagggattggcgaggggcagcccacacgtatgtgagttaatgggccctgaaaatccaccctgtccagggtaagcaactgaatccctaaatatgaattaggggacacttgcaggtcccagctaagcctggtatattatgatcaaaaagtcaagatttatacacaagccacatacggtggctcaccctgtaattccagtattttgggaggccaaggcaggaagatcacttaagcccaggagttcgagaccagcctgggcaacatagtgagaccccctcatctctacataaaaattagccaggcatggtagttcatgactgtggttccagctacttaggagagtgagatgggaggatctcttgagcctaggaggctgaggctgaagtgagccctgatcacaccactgctctccaatctaggagagagagggagaacttgtctctaaaaaaacaacaaatatggccaggagcagtggctcatagctgtaatcctagcactttgggaagccaaggtgggtggatcatctgaggtcaggagtttaagaccaacctggccaacacggtgaaacaccgtctctactaaatacaaaaattagccaggcatggtggtgggcacctgtaatcccagctacttgggagcctgaggcaggagaatcgcttgaacccaggaggcggaggttgtagttagacaagatcccaccactgccctccggcctgggtgacagagcaagactctgtctcaaaacaaattaaaattaaattaaaatttaaaaataaataatttttaataaagatttatacacaggatcctgttagtgaagataactttaaaatattaacacccattgctggcaaggctgtgaagagacgggcacttttgtaaattgcttgccagagggtaatcaattctggtaagcaatttacaaaagtgcctgtctcttgggggtgatccgcccacctcgggctcccaaagtgctgggattataggcatgagccactgtgtccagccaattctttttttgtttgtttgtttgtttagaactatcagggaaatcgtacttagtttttagatctatttcaaggaacctgacccaaggagagacataaattagcataaaatagtcttgctgcaccgtggtcatacccggcctgattctttttttatatcattgtataaatttaagaggtatgatggtttgatatacatatccatagtgaaatgattactacagtaaggaatttaacatatccatggccaggcacaggggcccacgcctgtactcgaagcactttgggaggccaagacaggaggatcatttgagcccaggagttcaagaccaccctggccaacacagcaagaccccatctcttaaaaatatatatacatatccatcaccttctataattacttttttggtgtgtggtgagaacacttaaaatttttttttttttttttgagatggagtctcgctctgtcacccaggctggagtgcagtggtgtgatctcggttcactgtaacctccataccacaggttcacgtgattctcctgcctcagcatcccgagtagctggaattacaggcgcccgccaccacactcggctaatttttgtatttttagtagagatggggtttcaccatgttggtcaggctggtctcgaactcctgacctcaggtgatcctcccacctcggcctctcgaagtgctaggattacaggcgtgaaccactgcacccagcccttaaatctattcttttagcaaattttcaatatacattatttttaattatagttctctactgtaccttggaactctagatttatttgtgctgcgtaactacaaattgtattcctttgacctacatctcccccatttcctccttctctccatccccggtaaccacagttctactttcggtgcctagatattcgactttttttttttaagattatacatgtaagtgggatgggcgcggtggctcacgcctgtaatcccagcactttgggaggctgaggcgggtggatcatgaggtcaggagatcgagaccacggtgaaaccccgtctctactaaaaatacaaaaacttagccgggcgcggtggcgggcgcctgtagtcccagctactggggaggctgaggcaggagaatggtgtgaacccaggaggcagagcttgcagtgagccgagatcgcgccactgcactccagcctgggcgacagagcgaaactccatctcaaaaaaaagaaaaaagaaaaaaagattatacatgtaagtgagatcatgaaatgtttttgtttctgtgcctggcttacttcactcagcgtaatgtcctccagctttgtccatgttgtggcaaatgacatgttttccttcattcttttcttttcttttttcttttttttctttttttttgagacagtgtcttgctctgtcactcaggctggaatgcagtgacttgatcttagctcactgcaacatctgcctcctggattcaagccattctcccgcctcagcctcctgggtagctgggattgcaggcatgcaccaccacaccaggcaaatttttttggcttttttgtgtgttgctgttgttttttagatggagtcctgctctgtcgccaggcaggagtgcagtggctcaatctcagctcactgtaacctccacctcccgggttcaagcgattctcctgcctcagtctccccagtagctgggactacaggcgcgcgtggccactcctggctaatttttgtatttttaatagagatggggtttcaccatgttgaccaggatggtctcgatctcttgaccttgtgatccacccacctcagcctcccaaagtgctgggattacaggcgtgatccaccgcacccggcaaaatacatgatgtcgagtcatgagaacagataataagaacccaaccaggtcttggcagcattatggctagcagagagaaaccagaagcaatctaagtgcccacgaataggggattggtaaggggaccatgaaagactgctttgtcacaatagtgtttgcgtgacactacgtgaagtgacaatggctagtagtatcaagtcccttgccaagggccaggaatcctctctagctccagccttgcagcctgatggcctctctgggtaaaaaacggacggggggagaacaaggtgctaacctgagttgtagagctgcagggtcacctcaggagacttctctgtctggttcctggcccaggattccacccagagtgtgacagtgtacagcacagacaccccagcctggtcggagaactgcagcctggtggctgagccggcggcgaagtagcagcagcgcccggagctaaggctgcagcaggaaggagggtgtcagtgccgagtctggggtcctagtggaccccacagccgactttgtgcatcacatcccagcatcgtttttttggtgtttgtttgtttgtttggagatggagtttcattctgtcacccaggctggagtgcagtcgcgcaatctcggctcactgcaacctccacctccctggttcaagcaattctcccacctcagcctccctagtagctgggattacaggcacatgccaccacatgcgtctaagttttgtatttttagtagagatggagtttcaccatgttggccaggctggtctccaacttctggcctcaagtgatccgcccacctcagcctcccaaagtgctgggattacaagcgtgagccaccgtgcccagcccccagcatccttttctgtcccttgtacacctcctcccccagcctgggggttccttggagatcagtctgggactggaggggtttgagggaccccagtatctcccagcaaggactgcaccacacagcgaagaaacgaatgaaagggctgggcgcagtgcctcacgcttgtaatcccagcactttgggaggccaagggggggtggatcacctgaggccaggagttcaagaccagcctggccaacatggtgagactctgtctctactaaaaatacaaaaattagcaggtgtggtggcgtgtgcctatagtcccagctactcaggaggctgaggcaggaaaatcactctaactcaggaggcagaggttgcagtgagctgacatcatgccactgcactccagcctgggcaacagagcaagactccatctcaaaaaaagaaaaaaagaaaaaagaaaaaatggatggatggatggatggatggatggatggatggatggttggatgggtggataagtgaaagggtgaagaagaaaaaaggactagagagaccctcatggccacccaccctgggatgcctaccttcactgaccaaccccccaccacaatcctccaactctctcttcttagatgagaaactgaagcccaggaaggagtgttgacccagccaagatcacgcatccgagagtaggggcaccagagggggttgaagcaagagtgggatggtgggtgagggtttgggaatggtagaggggtcctcaccaacaccgcaggaagtggctgaccccagctgtgggaccctcatactgccaggagcactcgtaacgatcactggatatccgatagcatctcaggtccctagggcccgaggccgagcctggaagagatcctgtaggcttgggaacagaccagagtctggaggggtcttcgtgcctaagacaaatctttgtgatgcttacatctttcagcgtcacctcagcctaaaccctccccgcgtccttcctacctcatcccctgccgtctctcacctcaacctattccgaatcctcagcctcctaacttgtcctcacagaggccagatgtcctgccacctctctctctatccctcaccctcctctggtgtttttttttggggggtccccagggccccaactttcctcctctggttcttcaaaacacatcatcacatttgtgatagacatttgtttgcctgttgtctatctcttccactaggctgtggtcttgggaagttagttgagctcatagccagttgcctatgtctagaactgtgtccgcacatagaagatgctcagtaaatcgttatcaaacaaaagaatggacagcgtgtctgcttagtgttcagacccttttcagggtgcattaggagcataaatgttccgacaatatggccgggcacggtggctcattcctggaatcccagcactttgggaggctgaggcaggtggctcaccatcacctgagctcaggagttcaagaccagcctgggcgacatggtgaaacctggtctctactaaaaatacaaaaattagccgggtgtggtggcgggcacctgtaatcccagctacttggaaggctgaggctggagaatagcttgaacctggaaggtggaggtggcagtgagctgtgatcaggccactgcactccaacctgggcagcagaacaagactccgtctcaaaaataaataaatgaaataaatgttctaataatttatcaggttggggggggggcttcaaaatgcttaacaggtactttctcccatgtaccgaccaatctgaacggacacagacaccagccctgagaccatgctagggaagtgataatgttcagagaggcggctggctactccagggcaacttgaacctggtaagaatgggccagcaggtggtggggtggggactcccaagaccacaggcagggctgggtctttggcctggtggtggaggccatgggaggggccgctgtggatggggtcaggcagagccctacataatcctcagccaacaatgaggaactgccccgaacctgagtctgcatccggatatggcgggtcctgaaaacagcactcactggttctgcaggcagctgcaaaggcaatgaagacataatgacattcctggccttgcactgtgtggggagaagggctcagccttggggtctacacccaagtgatcatcagccctcccacccacccactttcccatctatgcaccctcctaccaccacccatccatccatctgcccatgtatttatctgcccatctacccatccatccatgtatttattcatccgtccaccatctacccatccatccacccatgaattcatccattcacccatccatccatccatccatccatccatccatccatgtattcatccatcatccatccaccccaccatccacccatctacccatccatccatccatgtactcatccatccatccactcatctacccatccatctatccaaccatccatgtattcattcatccatccacccatctatccatccatccatccacctcaccatccacccattcacccatccatccatgtattcatccatccatgtattcatccatccatgcacccatctacccatccatccatccatccatccatccatccatccaccccaccatccacccatttacccatccatccatgtatttatccatccatgtattcatccatccatccacgcatctacccatccatctatccatccatgtgttcattcatccatctactcatccatccatctgccccaccatccatccatccacgtattcatacatccatccatccaccccaccatccgtccatccatccacgtattcatccatccatccatccaccccccatccatctatccatccatccatccatccatccatccatccatcaatccatgtattaatccatgcatccaccccaccatccacccatttatccgtccattcgtccattcatccatccatccatgtattaatccatccatccatccatccatccatcccaccatccacccattcacccatccatccatgtattcattagtccatccatccatccatccatccatgtatttatccatgcatccatgcattcattaatccattatccattcacccaaccatccatctatccatctagtcaccaatctatccatctatccatccacgtattcattcatccatacacccacccatccatccatttatctacctaccgatatatccatccagccatccatccatccatccatccatccatccatccatccatacatacatacatgtatttattaattcatccatccattcatttacccacccatccacctgtctatccattcatccaccaccctttagtcctcagaggttgagatgcatatttgggagacactctcgggaggtacccctgcaggaaagaacagtaagaccaacagtctggagggcagagagaagtggaggtgtgcctggggtggcaccagtgtctgaagccagcatggggaaagacagtagagggtgcatggcagggagaggcctgccagggctggcccaggcaagcacacttggcccactagcagtcagggcaattattaataacatttctccaggaggcagcgacctccctcagccactgggatccccgtgccctttgggattgccacagtctgctaggtgtggaactgggtgagagaaggagggggatgccaccatggatgggtcaggaagaccccggcgccctcactcccacaagaaggacctgtcctgagccctgcaggcagattggaagccttgggggagaaggcggcaccccaggaaacagccccaagtgtccaaccttgaggggggaaagatgcttaacacacaaggctctccatccttccatctctctctgtgatgacacagaacccccacccacccacccacccctgagagcctaaagcccatcctccttccctttccctggactgaccactcactgccactatctccaggatacctcgtgggctgcctctcgccccctccctgctgctggtctccagccatgcctggcccctgaaggcgctgggaccttgaggtgtggccagcactgctgtgggcattctacaggcactcagtgcatctcaagagccattgaaaaagtcagcaccccgctgatccccagtgtacagagaaggaaagtttatttattattattattattgagatagagtcttgctctgccacacaggctggaatgcagtgctgcaatctcggctcactgcaacctctgcctcctgggttcaagcgatcctcccacctcagctcctaagtagctgggagtacaggtgcccatcatcaagcctggctaatttttgcatttttagtagagatggggtttcaccatgttagccaggctggtctcgaactcctgacctcaagtgatccacccatcttggcctcccatagtgctggattttcaggagtgagtcaccgtgcagggcctgagattattaaaagtatatgggaaggctgggcatggtggctcatgcctgtaatctgagcactttgggaggccaaggtgagtggatcatttgagcccaggagttcgagaccagcctgggcaacacagcgagacgctgtctctgtaaaaagtatacaccaaaaaaattaaccaggcatggtagtgtgcacctgcagtcccagctactcaaggggctaaggcaggaggatcacttgagcccaggtggtcaaggctgcaatgagttatgattaggccactgcactccagcctgggacacagagtgagaccctacctcagtaaataaataaataaataaataaataaataaataaataaataaataagtaaagtatacggaaggatgtgcataggttatatgcaaatactttaccattttatatcaggaacttgagcatctttggattttggtatctgcagagggtcctggaaccattgccccgtaaatatggaaatgactgtatacattatattatgtatgtctatctattgtaaactacatacataagatactatactatgtatacctattagatacatacttgctttttattccttccttagttttttttctcattgaactccgggaggtggaaaaaatttagtgcatttcacagaagagaaaatctagaccagaggaaagatgtctaagttcgatcccagaagccatgactgcccatctcccatttgacagcaggaaagactgaggcacagagagatgaaaccaacccacacagcaggcccacagctctccacacatacacgtgcctccacccagcaagaggagccgccatgccagggtcaggggactcaccgccctgcctggacagcaggaagaggaagaggagggggaccacccaggtcaccagcggctccatcggatccacgtagagccccacagccccaggggagcctctctgccacctgcgaggttcagccaccccgtccccactccggaacacattgaagctgagcaaggagaaaagactgaaaaaaaagaaaaaagaaaaaaagtaaagtgtcacagcccatccctaaggcaagtcaaagtgaaagagaaacccaggaagtcagctccgtggtggtggtgatggtggcggccacagactctggagcaagtctgactttggagcaagtcagggttctagggggttctgccctgctggccccagacctgaactgaacacccagatgccagccccatgggcccatgggccacctgtggttccatgcacttggccaggtctctggccctctctagccaatttttttttttttttttgagatggagccctgctctgtcgcccgggctggagtgtggtggcatgatctccactcactgcaacttctgcctcccgggttcaagcaattctcctgcctcagcctcccgagtagctggaattacaggcaactgccacaacatcgagctaatttttgtatttttagtagagacagggtttcaccatgctggccaggctggtctcgaactcctaaccctaagtgatccacccacctcagcctcccaaagtgctgggatgacaggcgtgagctaccgtgcctggctgccaaattctttttttcttcttttgagatagggtcttgatctgtggcccagctgtagtgcagtggtgcaatcacggctcactgcaacatcaacctccccaggctcaggccatcctcctacctcagcctccccaggaactgggactacaggcatgcaccaccacgcccagctaatttttgcatttttttttttttaagagagggggttttgccatgttgcccaggctggtctcaaactcccgggttcaaatgatccgtccgccttggcctaccaaaattctgggatcacaggcgtgagccaccgcaccgggccatctcgccagcttctgaatctgagactcaagagctgaaggagggcagtgttcttggatggcctaatttcatccttccaacaaattgttacaaagagcttgcagcatgctggccctccacaatgcccacctccccacatgccaagctccagccttgtgcacctgggctcacccctctaatcccagcactttgagaggtcgaggtgggaggatcacttgaccccaggagtttgggtctacctaaacaacatagcaagaccccatctctataaaaaataaagaattaggccaggcgcggtggctcacgcctgtaatcccagtactttgggaggccaaggcaggtggatcacgaggtcaggagtttgagaccagcctgaccaaaatggtgaaaccctgtctctactgaaaatacaaaaattaaccgggtgtggtggcaggcacctgtaatcccagctactgaggaggctgaggcaggagaatcgcttgaacccaggaggtggaggttgcagtgagccgagatcgcgccactgcactccagcctgggcaacagagtgacactccatctcaaaatatatatatatatataaattaaaagttagccagtcgtggtggcacacatctgtattctcagctactcaggaggctgaggtgggagaatggcttgaacccaggaggttgaggctgcagtgaatcgtgattgtgccactgcactccagtctgggtaacagagcaagatcctgtctcttaaaaaaaaaaaaaaaaaaatttaagagatgcaacttagtctttcccccatgttccatttcttagcctctgagtattttgtttcctgcccctccctccccactgtcggcaaagcctctaaatgtcagtggagaagctctgatccaagctaccatgtggatgaaccctcaaaaacataatgctgggctgggtgcagtggttcacatctgtaattccaacactttgggaggccgaggtgggcggatcacctgaggtcaggagtttgagaccagcctggccaacaaggcgaaaccctgtctctactaaaaatacaaaaatttgccaggcctggtgacatgtgcctgtaattccagctattcgggaggctgaggcagagagaattacttgaacctgggaggtagaggttgcagtgagctgagatcgtgccactgcactccagcctgggtgacagagtgagactccatctcaaaaaaaaaaaaacacacatacacaaaaaaaaaaacccatcatgctgggtggacgaagatggacaggaaaggcacacactgtatgattccacttatataaaatatccaaaataggcaaatgtacagaggcagacagtagctgagtggttgtcaggggctggggggaggcgggagtgagaagtgactgctgatgtatgcggggtttccttttggggtgatgcaaatgttctggaaccagatagaggtggtggttgcacaacactgaatgtgctaaatgtcactgaatcgtttgctttaaaatgatgaatttccggcccgggcgcggtggctcactcctgcaatcccagcacttgggaggccgagccaggtggatcatttgaggtcaggagttcgagaccagcctggacaacacagtgaaacccagtctctactaaaaatacaaaaattagctgggcgtgatggcatgcacctgtaatcccagctactcaggaggctgaggcaggagaatcgcttgaacccgggaggcagaggttgcagtgagccgagatcacaccactgcactcccacctgggtgagagagtgagactatgtctcaaaaaaaaaaaaaaagatgaattttaggttacgtgagatgcatctacagaaaaaagaaatattcttagagtccaggggcactgaggagggagaaggagagggtctctcctggggatgagcatctgtggaaactgaggcccaagtggccagggttgtgcaatgcggttcagcttcctgggaggaggtccctccttcaagaagcctggctccgaggggcagctgagctggccagggtcaggcgcccagcaggctatgaggtcagtgagttagggacaaagactcagtgtcctgggcctggcacagtggggacgggggccctgtgaccccatacaggacagccttctctggccccggggcccaggccagggtcagctgggggatggatgtgtgaggcctgggggaggggcagagacagagaaagggacagagatagagagatacataaagatggaggaggccaggcagggtggattatgcctgtaatccagcactttgtgaggccaaggcaggaggattgctgtaggctaggagttcaagagcagcctgggcaacatggtgagactccatctctacaaaaaataatttgctgggcatggtggcaggtgcctgtagtcccagctacctgggaggctgaggcttaagccagggaggtcgagactgcagtgagctctaattgcgccactgcactccagcctgggccacagagcaagaccctgctcaaaaaataacaagaaaggtggaggaaataggtagagatcagaggaaagtcatggccccctcctgaccatcctgagaccctcccaactccaccaattcctggagagtccctcacttgccttatttcacagattgggaaactgagtccaggggcactcagaccacctgaggccccagctggagatgaagagatggattcaaaccaccccttgtggagtatagttttgccccttccagagtggagaccgtgcctcagggcttcccccacccgcaccaaggttggccctctcaggcctcatctttcccacctgcaaaatgggcttttgtgagtatgaaggagggcttggcttgcagtgagcgctgtccacccgctggccagtgtgattagtcattgttgttgttccccagtggcctctgcctggcagctgctggaaaaacatcgagggagggagatacagggctggggaggtgaaaagctggacacagacgcccctagccccttgggatcaggaacagatggaggccgggtgccctgaagtggagcagggaggactgcctggaggagggacacttgagctagaatgtatagaattacagggcatctccggcagaggccacagcagaggcaaaagtccagaggaggtgctttggggaccaccaagatggacacagtgggtctgggtttctgtggggtgatgggctggggcctcgagcgccaggctaaagggcctggctttctccgagggcggtagggagccatggcaggtgtgtgagctggaggggtaccccagacaaaggtgaagtggtatttctccccttattgaagtcacaacctgacactccctctgaagttccccacatcccaccttccccttgccacatcttggcaagcccacctccttccctccgtctctaggcctgccaagaggccctgtgggccccttatggccccacccagctgccccagaagctcgtctgagataagttcccagggctgccccactttcaggtgccccacagactcgggggcgggtgaagcaggaaggatcgagtcacgagggccccagaaaacatgacgggaggaaccacagcacttccccacctcctcagcttccgccttctcagggagagagaccttcagcccgaggaggagggccgagcttccctccatgtggcaagagaccctaacgtcgctgaggatcatctaaagagggtgttgaaggatgcataggagttagccaggagacaacccatttgttaatttaacaaactcataggcatcactcatcaacaagaacaattttcatcattcaatcaggactttctaatgcctctgagggatcatttgaggatgtttaattattatttttatttgagacagggtctcactctgttacccaggctggagtgcagtgacacaatcatagctcactgcagcctcaacctcccagtttcaagctatccttctacctcagcctctgatatagctgagacacaggccaatgccaccatgatgcctggcttttcttttttttttttttttttttacttttgagacagagtcttgctcagtcacccaggctggagtgcagtggtgcgatttcagctcactataacctccgcctcctgagtttaagcaattctcctgcctcagcctcctgagtagctgggattacagacatgcaccaccacacccagctaatttttgtatttgtagtagagatggggtttcaccatgttgtccaggctggtctcaaatgcctgaccttaagtgatctgctggcctcggcctcccaaagggctgggattaccggcgtaagccaccgcccctcgaccatccagctttttttttttttttttcagtttttggtagaaatgtggtctcatgcctgtatcccagcactttgggaaggccgaggtgggcagatcacttgaggtcaggaattcgagactagcctgaccaacatggagaaaccccgtctctactaaaaatacaaaattagccgggcatggtggctcctgtctgtaatcccagctacttgggaggctgaggcaagagaatcacttgaacctggtaagcggggtttgcggtgagccaagatcgtgccattgcactccagcctgggcaacaagagtgaaattctgtctcaaaaaaataaaataaaataaaaatacaaaattagccaggcatggtggcacgcgcctgtaatcctagctactcaggaggctgaggcaggagaatcgcttgaacctggtaggcggaggttgcagtgagctgagattgtgccactgcaccccagcctaggagacaagagcaaaactctgtctgaaaaaaaaaaaaaaaaagaaatgtggtctcactatgttgcctaggctggtctcaaactcctggtctcaagggatcctcccacctcagcctcccaaagtgctgggattacaggcatgagccaccgctcccaaacagattagaggatgttttaaggaagactcaggaggttaccaagaaaaaagttcattcaaccaccacacttcctgatgtcccttatagagacatgtgaggagagttttgatgggtacatagaagctcacaagaataaaatgtatttgttcattcaatacaaggtcctctgatacttctcaaagagaatttgaagtggattttgaagaatatatagatgttaggccgggcacagtggctcatgcctgtaatcctagcactttgggaggctgaggtgggtggatcgcctgaggtcaggagtttgagaccagcctggcaaacatggtgaaaccctgtctccactaaaaatacaaagattagccgggtgtggtggcaggtgcctgtaattccagctactcgggaggctgagcgcaggagaattgcttgaatccaggaggcggaggttgcagtgagccgagattgctccactgcacttcagcctggccaacagagctggacttttgtctcaaaaacaaaaaacaaaaaaacacaaatatatatatatatatacttgtgtgtgtgcgtgtgtgtgtgtgtgtgtgtgttaaccacagaaaaactgcattcattcattcagtcagtccagtcagtcactcaataagcactccttcttgcccactgaggggttgttcaggaggcagttcagtgtaggaattctccagatggagcagcggatttgagacctctctggtggctctctccagcatgttcccacatgcccaacccaaccctggttcagggaacctctctttccccaggattccagtcaaagccccagggagggctctgataggctgagcttgggtcacatgtacaccttgaaccaatcacagtggctgaggtggataaacgagtctgagtcacatgtccaccccaggctggactaagggagaactttgaggcagagctgcccagagtcagaacaattggccattgcaggacatgagcttctcatcacttggggtgtgcaagctacagcctgaagttcacttagtgtaggactgccagataaaacacacgacttccccacccccattgacttctgccttctcagggaccttcagcccgaagagtggggagcttccctccatgtggccaagagaccctgatgcccctgaggggtcatctaaagagggtgttgaaggatgcataggagtttgccaggagaaaatctattcattcatttaacaaactcactcgtagtcattattcattaaataacatttaaattaaattcccagttaaattggaatttcagacaaccaacatattggtttgtgttttgttttgtcttgttttgttttgtttgagatggagtctcgctctgtcacccaggctggagtgcactggcactatctcagctcactgcaacctctgcctcccaggttcaagtgattctcctgcctcagccccccgagtagcggggattacaggcgtgccccattacgcccccttaatttttgtagttttagtagagacgcggtttcaccatgttgcccaggctggtctcaaactcctgacctcagatgatccacccacctcagcctcccaaagtgctgggattacagacatgagccagcacacacggccaacacattgttgtttaatgcaactatgtcccaagtactgaagggggcatacttacactgaaaaaacattcattgtttatggaaatttaaatttaactgggtgtttgctttggaaaacagcctggttgtcttttacaaatttaaaatatagagttgctgggcgcagtggctcatgcctgtaatcccagcacgttgggaagccaaggcaggaggatcgcttgagcccaagattttgagatcagcctgggtaacatggcgaaaccttgtctctacaaaaaatacaaaaaattagctgggcatggcggcatgtgcctgtagtctcagctactccgccctccagcctgggcgaaagagcaagaccctgtcccaaaacaaaacaaaacaacccaaaacatagagttacaccatatgaccccggaagtccattcctaggtaagtacccaagagaaccaaaatatatccacaaaggcagggggcggtagctcacacctgcaatcccagcctttcgggaggccaaggtggatggatcacttaaaggtcaggagtttgagaccagcctggccaacatggtgaaacccccgtctctactaaaaatgcaaaaattagctgggagtggtggcgggtgtctgtaatcccagctactcaggaggctgaggcaggagaatcaattgaacctgggaggcagaggttgcagtgagccaagatcccgcgactgcactccagcctgggcatcagagcaacacttcatctcaaaataaataaataaagaaataaatctatgcaaaaagttgtatgccaatgtttatagcagctctattcagaatagctaccaaaatgtgaaaaaatccaagtgaccaccaacaaatgagtggatcaacaaaatgtacatgtacatatatacaatggaatattatttggtcatgaaacggaatgaagtactgatatttgccacaacatgggtgcatcttgaaagcatgatgctgaacgaagccagacacataaggccacatgttatgttttcatttttatgaaatatccagcacaggaaaattcatagaacaggaagcagattggtagttgccaggggctgagagagggggaatgaggactggctgctaataggtacagggtttcttttggggatgatacaaatgtcctggaatcagatcgtggtgatggttacacaactctgtgagtatgcttaaaacactgaatttattgcacactttaaaagcgtgaattttatggtatgtgaattatatgtcaatttttaaaattgtatgagaaaaacaagttttccctggcatcctgtatttttatttgctcaatctggccaccataacttgatgcaattctacagtacctcatggacagtcaggcccagtgacccttcctagggtcccctcgagcctgaaagcatactccagtgtccacactgtacagtggggcagccgaagacaactgcggctgcagagaaagtgcgagtcccagggaaagaaaaaatgcaggtgctaagccaggcacagtggctcatgcctgtagtcccagcgctttgggaggctgatgcaggagcatcacttgaggccaggagttcgagaccagcgcgggaaacatggcggtactccatctctacaaaaaaaacccaaaaaaattagccaggcatggtggcatgtgcctgtggtcccacctactctgggagctggggtatgggggctgaggcaggaagatcgcttgagcccgggaggtagaggctgcaatgagacaagattgcaccactgcactccagcctgggtgacagagagagaccctgtctcaaaaaaaaaatttttttttaaatgtgggtgctattttgggactttgggcttttctcagcctcagtttcccctcctgcaaaatggagtagaacaattatcttcaaatatctgtgagagatggtgtttatgagacacttagggcaaaaaggcaatcatcctcaaaaaagaaactgacaactgcagcggctacctgcttttgtaagtaaagttttattggcaccagggccaggattaaagggaggcaaacaaggctgagtggtgcaaggacaagggtctgatcatgtcttaagagttttagtgttttggccaggcaaaacaccaaaactctttggcctgcaatcccagaactttgggaggctaaggtgggtgaatcacctgaggccaggagttcgagacaagcctggccaacatggtgagacctcatctctaccaaaaatacaaaaaatcagcctggtgtggtggtgggcacctgtagtcccagctactagggaggctgaggcatgagaatagcttgaacccaggaggcaggggttgccgagatcatgccactgcattctagtctgggcaacagagagactcgtctcataaattaaaaaaaaaaaaaaaaagttttggtgttttggccatatgcggtggctgacacctgtaatcccaacactttgggaggcctaggcagaaggatcttttgaggccaggagttcaagaccagcctgggcaacatagtgagatccccgtctctaaaaataaaataaaaaataaaagttttgatgttttgttcatcataaatgttttcattaattttatgtttttaaaatattatttctcttgatggctgagttttgtggggccaccttaaattttgcacaggggtgagatcctcactcgcctcaccctagaacccgttctgctgtgtgtactgggcacattttttgttgttgttttgtttttgtttttgagacagagtctcgctctgtcgcccagtctggagtgcagcggcgctatcccggctcactgtaacctccgcctcttggattcaagcgattctcctgcctcagtcttctgagtagctgggattacaggcgcgcgtcaccacccccaagtaattttttttttgttttgttttggttttttttgtttagtagagacagggtttcaccatgttggccagggtgatctcgaactcctgacctcaagtgatctgcccacctcggcctcccaaagtgctgggatacaggcgtgagccactgcgcccggccaatgcgctgggcatattgattaacctatcttagcctcagtttcttcatctgcaaaatggggctgaacgatgctgccttacttctgagaggattcatgcaaaatatttacttctgcgctctgctggaggggcggggccagctcgcccagtgggggcggggccctgtggtcgggctccccgggaggggcggggccaggccgtgtcagctgaccggcctggccaatggcacctggcggcggggcctggcaggccggggcggggccgggggcgggcctggcggcgcggactcccgggccatggacgagtcgagcctcctgcggcgccgcgggctccaggtgaggcccctgcgcgggcgggcggaaggcagagggcgcggccaagtggacgcggcctgaaaggtgccgggaggggcggggccttcacgggctgtagggaaactgaggcagagggtggggaacgctcagatcgcttctttttgaccacccgcttctcaaagtgctttttctcatggtgggaagggggaaggtgcccccttggacatctagggaaactgaggctccaagcgatggcgtgggaggaagaggctgagggctctgcccctccccaccagctgttctaataataatgctagcaacagcagccagagagctcaccatatgttcatggttgttttagtcctattactagcgatgtattaatatgagttcatatgtattaatacctccttgggtcgtcgctgcaccactgtacaccctcagctcagccctacgacgacctggggaggttggggctgtcaggcgcccatttgtcagaataaggaaactgaggctctagtcccggaaagccactctccagaggtcgcctagctgggattcgatctgcgccctcaaccagctctcttacggcacaaggcgctgccaaccagcagtgtgacctggggggagggcacccttgcttctctgggcctcagttttccaatgagccatagggtcctccttttactgagtttatgtttaggaggctgtgtcatcaggaggtagggacacaggcgtcggggacagcagaagcctaagtttgaagccacacagggactacatgaccccgggcagccaccctttgacttctctgggcctcagtgtccccattataagaaaagaaaaacaggaattaagatttggccattttcctctgggacttagaccacacccttaagaagccaccaagttttcaggtagggaacctgggattcagcacttacccaacgaacatttatggagcgcctgctgtgtgcctggctctggagaggcagcggagtgttctgcaacctctggagctgccctcctagaaaccccaacctgttgggggaggtagacgccagagcagcggtgaccccacggagtgatcagttgtgataagggactcacagcaagtgaaggaggcgcctgacccagtcattgctgggagccctggggtagaggaggcagccaagggtggcgaggcattgcagcggggggcggtatttagggaaatgaaagaggttgacagaagctggaacctagggaggactgagcaggtggggtgggggtcggggactgaggttagctccgggcgggttgagggggtgagaggaatggggccggcgggtctccaacctggagccgcaccggtagctgcgggactgcgaactcagcaggtgatgggaagccaggtcgggagtggtcagggaaggcacgggctgagctgcagatcagagacacccggtctctggccgcgcgggggtggggcagaactggaggcgctgaggccagaggcaagagtgggggacttgggcggaaaggagggggcggggcgggattggcgagcagcgtggtgttggtgggggggcagtcccgcctccagccccagttagatgccaacccgcccgcagcctcttaaaatagagaaaccgcctccgggtaggcgaatgggggtgctgctgacgtcaagaagtggggcctgttccatggtgggggggtcaaacatttcctgatggtaagttctatgttacaaaaggggaaactgaggttcagagaagcatagccactgtccgggtttcacaaagtataggtgacagagtcagacaggatttgaacccacgcagttccggcttcctctccaaaccaacccagcacaggcgtccctccacgaaggtggagggatgagcacggattccccgactgaatgagggcattccgggcagaggccacagcacgtgcaaaggcccagaggcatgtagcctttcttacctgtttatatggggaaacaagaacttgaacctatttcttagcactagaggctgatggccaggacttaatgcttccagggccttcagtgctgattttgaagaggttagactttccccctagggtgatggggagctatggaaggtgctggagcaggagaggacatgcccatattgaggggctgggaagactcctctggagggctaggagcaggagtgggggaatcaaaaagggcaggaagccaggaaggagcatggaatgaaagtctaagtgtaccaggtgtggtggctcatgactgtagtcccagctactcaaggaggctgaggcagaaggatctctctctctctctcttttttttttttttgagaaagaatcatgctctgttacccaggctggagtccagtggcgcaatctcggctcactgcaacctccacctcccgggttcaagtaattctccctgcctcagcctcccgagtagctgggattacaggcacatgtcaccacgcccggctaatttttgtatttttagtagagacggggtttcgccatgttggccaggctggtatcaaactcctgatctcaggtgatccgcccacctcggcctcccaaagtgctagaattacaggcgtgagccaccgcgcccagccaagaaggatctcttgagcccaggagtttgaggctatagtgagccatgatcacgagaccctatctcaaaaataaaaataaaggtccaagtggaagaagattaaaataataataaaataatagtaaagtgggaataaccgttcatattaacaggctaagccctctcatgcattcaattctcccaacagcccgagtggtcagtgctattattagttccacttttcaaaggaagaaactgaggcccaaagagggaagtacccaccaggaagccagagaaattctaaccaatctggcacgtgaaggtgttgtcttcatcagccccagtttggggtctcttttgactggaaaccttgttaatggtccaggagcaccccagccaatcagggggtagatcgctgatgcgagccaatcagatttcctggaggccaaaggccaaagagtccattcacaaacgggtgctgaccggccaatccagacgcatagcccagggcgtcctctccggtggtgacaatgtgaggcgtgctgttggctgtgtgcaggaaaggtctgaaaaaggatccggcctggcccgcgggcggccagtttgcgacagccctgggtccagggaggaggtggagaccttcccaatttgggttaaactcagcctcacgcataacgtgtgcaggcaccgggtaacgtgagctgttattactactactactattatcttattacatttatcatctcctacttggacctttgctttacacatgaccgaatttcaaaacaccaggtcccacaaacagagcatcccccggcagagaagggctagagcctgtatctggacttttgtctctgccgctactggggtggctcctctaggttcagccctccaaggtgatcctgctttctcatggacagcttccacttattttcctcctcctcctcctcctcctccttctccttctcctcctcctcctcctcctcctggaagccctggggctggtgccatgtggtccatgctgacttctctcccatttaattccaggggcatcgaacttccaaccgggcttggtgcccagcaggctgagtctcacctccctttgcacgtgctgtttgctgggcatggactggtgttttccatgtgcctgcaggctttgtttgacaccccctactccaggaagccccttagctctcctctctgtgtgcctccaacccctcttctccctttgagtctctctttttttagacaggatcttgccctgtcgcccaggctggagtgcggtggcccaggctggagtgcagtggcgccatcttggctcactgcaggctccgtcacctggatacaagcgattctcacagcctcagcctcctgagtagctggattacaggcgagcgccaccacacccgactaatataatttttatattttttagtagagatggtgtttcaccatgttggccagaatggcctcaaactctttttttttttttttttttttttgagacggagtcttgctctgtcgcccaggctggagtgcagtggcgtgatctccgctcattccacctcccaggttcatgccattctcctgcctcagcctcccgagtagctgggactacaggctcctgccaccacacccggctaattttttgtatttttagcagagacgggctttcaccgtgttagccaggatggtctccatctgctgacttcgtgatcctcccacctcggcctctcaaagtgctgagattacaggtgttagccactgcgcctggccttttttttttgaaacggagtttcactctttcgctcttcttgcccaggctggagtgcaatggcacgatctcggctcaccgcaacctctgcccccgagttcaagcgattctcctgcctcagcctcccaggtagctgggattacaggcatgcgccaccacatcctgctaattttgtatttttagtagagacggggtttctccatgttggtcaggctggtctcgaactcctgacctcaggtgatctgcctgcctcagcctcccaaagtcctgggattacaggcatgagccactgcgcccggccaccttttttttttttttttttgagacggagtctcattctgtcacccaggctggagtacaatggtgtggtcttggctcactgcaacctccgcctccggggttcaagggattctcctgcctcggcctaccgagtagctgggactacaggcgcctgccaccacatccagctaatttttgtattttaagtagagacggggtttcactatgttggccaggctgatcttgaactcctgaccttgtgatccgcccaccttggcctcccagcgtgctgggattacaggcgtgagccaccgcacctggctcaaactcttgatcttaagtgatcctcccgcctcagcctcccaaagtgctgggattacaggcatgagccacagcacccagctgcttcgggtctctcttaatccctccagtatgggggtgctcctgctgtgctatgtcttctccaaaatgggatttcctcaaggtggggctaaagcttgttggggaggcagcatcccccagcctgggcaagcgcagacgggtataccataaatattacctttaaagggcagtttcagggggtcggggcctccccaacctccactcctctgggtgggaaccactcccaggggaacagcaggcacagagggagctgtgggtggaaagcagatggtgcggggaccgaagggtccgggagtggtgccaggagagttctgtgtggtccagcttccccgggagcctttgcagggagctgccgattttgcctcacctctctctgccactttaaaaaaacatcttcaggccaggcacagtggctcatgcctgtaatccagcgttttgggaggccgagatgggaggactgcttgaggtcaggaggtcaagaccagccagaccaacatggtgaaatcctatctctactaaaaatacaaaatcagccaagcgtggtggtgggcgcctgtaatcccagcttacttgggaggctgaggcagaagaatcgcttgaacccaggaggtggaggttgcagtgagacaagatcgcaccattgccctccagcctgggcgacagagcaagtctccatctgaaaacaaacaaacaaacaaaatattcacatctttttgtcttttggaagcaactttcaactggtggttattattcacgtcttgatcattgtcttgactcccatccatccaagtctcccccagcaccaggctctgagcttgctactcattgattcctccagggaccctatgtcactgggccattttccaaatgagaaaactgaggcacagaggggttaagtcacttgtcgggtcacacagtgcaggagtgggggagccagactgggaacctaggactgtcagagttttggaaggaaatgcctggatggggtgcaagtgggaccccccaccagggttcaaatccctccctgtttcacgtggggtagtggaggaagtggtataagatcccacaactggctgggtgcagtggctcatgcctgtaatcccagcactttgggaggccaaggcaggtggatcacttgagaccaggagttcaagaccagcctgggcaacatggtgaaacctcatctctataaaaaatacaaaaattagccgggtgtggtggcacatgcccacaatcccagctactctggaggcggaggttgcagtgagccaagattgcaccactgcattccagtctgggcgacatagccagacgctgtctcaaaaaaaaaaaaaaaaaaaaaaaaaaaaaaaaaaaaaaaattcccacaactattggaaggggaagaaggagaccctaatggccacggtgatggtggtgatggttccatcaccatgactgcttgaactaaacgccgtgagttgtctgtcctcagacatattcaagcagtcagagagaccttcgaggggtagattattctcctcccatcgtgacagcttggttttctgagcgcagagcagctgaagtcaggcctggggtaacgccacacccccgcgacccttccccgcctctcccgggagaccttgccctcccagctgggtcatccggcagcccagcagcttccggccccctccaattggctgtaggggccgatggcgtcactggttgctatggcgaacacccagatcacgacgtgggcagcctggagcccaccaaagtaaaaatagtcgtgtgtccccaacgtggccgccctgatgtgtgtggagggagggtgtcctgagacccagtttcctgcctctcactccactaagagacgtgggcagccggctttcctctgcacctaagtttccctgccagtaaaacagcccctgcccgcggttcgtaggaggtggctcagtaaatgcaaggacatttaccaggtattatgacagcttccatggtcccttgctgagctcaacaatagtacaacagcacacaacagcagcaatagtaatggctgatcatgattaacccagaaccctcctcacgtcatctccagttacagatggggaaactgaggcacggggcatacaaataatttgcatggccaggaagaaacagagaattgaactggacccaggtctgggtgtccccagattctaaacttgtgccacatggcattttgagaatttaataaaccctcgtgattgaccgggtgcgatggcttacactgtaatcccagccctttgggaggctaaggtggatggatcacttgaggtcaggagttcgagaccagcctgggcaacatagtgaaacctcgtctctgctaaatatacaaaaattagccaggcatgctggcacacacctgtaaccccagttacttgggaggctgagtcaggagaatcgcttgaacccgagaggcagaggtttcagtgagccaagactgcaccactgcactccagcctggcgatacagtgagactccatctaaacaaacaaacaaacaaacaaaaaactggttttttggccaggcatggtggcttatgcctgtaatcccagcattttgtaatcccggcattttgggaggccaaagtgggtggatcatctgaggtcaggagttcaagactagcctgggtaacatggcaaaaccctgtctcttctaaaaaaaaaaaaaaaagtcccagctactctggaggttgaggcaggagaatcgcttgaacctgggagacagaggttgcagcgagccgagattgtgtcattgcactccagcctgggcaacaagagcaaaagtctgtctcaaaaaaacaaaaacaacaacaaaaaaaaaccctcttgggcagcccatgtctgaggatggactgtgaggtcacagtggaacacaagctcacggctttctatccttcatgcggtgagggcacccagagttggtgcaggtcagtttgctgagctctaaaagggtcttcaaaagggagtcacccgtcagccgtcctccccacgcccccactggtacccagggcccaaacctgcataggctttgcagcgagtgaggagagaatggcgttcagacctagacccaggaggagagggacatctgagatgggacagggagaggacaactcaggaatctctgttttctcaacagattattagtttttagccactactgacatacttcttcataaatacaactaattggtaattttaaataaaattattattaattttttttagacttagagtcttgctctgtcacccagactagagtgcaatggtattatcatagttcactgcaacctccaactcctggggtcaagcaatcctcccacctcagtctcctgagtagctgggattgcaggcgtgcaacaccacacctggctaatttttttttcttttttgagacggaatctctcattgttgccaggctagagtgcaatggcaccatctcagctcactgcaagctctgcctcccaggttcaagcgatcctcccgagtagctggggctacaggtgtgcaataccacgcccagctaatttttgtatttttagtagagacagggtttcaccatgttggccaggatggtcttgatctcttgaccttgtgatctgcccgccttggcctcccaaagtactgggattacaggcatgagccaccgcacttggcccttcttatttatttatttatttatttatttatttatttatttatttatttttgagatggagtttcgctcttgtttcccaggctggagtgcaatggtgtgacctcggctcactgcaacctccgcctcccgggttcaagcgattctcctgccttagtctcccaagtagctggaattacaggcacccaccaccatgcctggctaattttgtatttttagtagagatggggtttcaccatgttggccaggctggtcttgaactcccgacctcaggtgatctgcccacctcagcctcccaaagctctgggattacaggtatgagccactgcgcctgaccggcccggcctttttttggagacagggctcaagcaatcctcccacctcagccccccaagtagctaggagtacaggcttgagccaccatgcccagcaattttttttttttttttttttttttttttttgtagagacggggtttcactctgttgcccaggctagtttcaaactcctgaactcaagtgatccatccgccttggcctcccaaagtgccagaattacaggtgtgagccaccgcacccggcctactctggctaatttttttaaaaagttttgtagagatgtagtcttgctatgttgcccaatctggcttaaacttctgggctcaaacaaccctcctgctttggtctcccaaagtactgagatcacaggtgtgagccaccgtgcccagcctaaaatattttttaatgcaggtatggtaggagccgggtggggaattagactgtgaatctggagggcctccaggaagaaaggatgttgagttcagatctggagtatgagctgcagttaattagggccagaagggagggaaggctgttctgagagagcgcacagatagcgcaaaggccttgaggcagggctgagccagtgtgtagagtgagcgggaaagatgcattggttggggcatgggattggggattgtgggggtgcatcaacggccaggggttctgagggctagtctctctgagaatgatccccatttctgtctcattgcagaaggagctgagcctgccacgccgaggacgtgggtgagttcacctgggactggcgggctgggtgggccccagtggtcttggaagtggatatttcagcaacagccactgaattgtgaatgtatttaataattacagcaacacatctcatgttcattcttgccctcgtgtttgcaaagtgcttcacaagcacctggcctctcaccacaaacatgggaggccatgccagtttgcaaatgaggaagctgaggtgcaaaggggtttcatcaccagctaaggacactcagctgggaaggagagaaacttgtctggaatccagagtccagatgttgaatttcagctgaagtgtattagaactggcttgaatgcctctcatgacggggagctcacttccttttggggaacaccagcagaaaatcatctctcagctaggcacggtggctcccgcctgtaatcccagcactttggaaggctgaggcaggcagatcacttgaggccagaagttcaagatcagcctggccaacatggtgaaaccccgtctctactaaaaatacaaaaaaattaaccaggcgtggtggtgctcgcttgtaatcccaggtactcaggaggctgaggcaggagattcgcttgaagtgaggtgaagattgcagtgaaccaggctcccaccaccagacttcagtctgggcaacagagtgagactctgtctaaaaaaaaagaaaagaaaaaaatcatctctctcgggatcacatcagtgttcctgtaggttgggtttttttttttttgttttgctttgttttctttttgagacggggtccctctctctctgtcacccacatagtacagtgcagtagtgtcatcttggctcactgcaaccactgcctcccaggttcaagagagtctcccgcctcagcctccagagtagctgagactacacatgcgagcctccacacctgacttgtatgtttagtagagacagggtctcactatgttgcccaggctggtctcaaactcctggactcaagcgatctgcctgcctcaacctcccaaagtgctgggattacaggcatgagccaccatgcccagtctaggttaccattttttatccccaaatcttagagaacattattgttcaatgctttcattcatttacagatgaaagaaaccaaaggccggggtggggaggggttttccttgagctagtggtctggaagtgtgtgactgtggacaccccatctttgggagctgcttttgcctgagttgggggtgggaatcactcaatgaacatttttttgagcacctgctgtacactgggccctgctgaagccagaggggatacagacaattcaatctcagagcaatggttgaagttttgtactcaggagagagctcaaccagagaaagagacagaggtgctgggggtggctttatcctgaagatctggggcctcttggaggaagtgacctttgagcttagatctggaagaagaggaggagctggcagcggggaagtctggggagaatggcattccaagcagcaggaacagcttgggcaaagtttctggggtgccagtatgcttggcgttagaagaacagcatgaagacaagggtagctgagtggagtgagtggagatgaggtggcaggacagaaggaggaggtcctgggaatggggtcagagtggcccccaatcccaggccatctgcttctgttccagtggggatgatacagttggtggggaggtgcttgaaggccccagtggttgggggttgctgggggactgggacattgccccgagagccggcactgtttccagccttggcccaagctgtgggcagagtgttggaccgtgaatcaatgaggactgccgagggcaaagtcctggaccttggggcaggacagagccaaagactccacaagggatgtccactccctgccaccttccctgtgccccactgggtccaccggggcctcaagagggccagagtgagacacagacacccccagaccgtggggtttgcgctgagagggaggaaggacagagctggcggcgcctggtgctggtgggggtgcaggtacagcttggcggaggaggggctggtggggttgggatcgtatatgggtgagggggcgaccttcctggcagaggaaacagctggaagccagggactggaggtgtggtcagagcctctagtgtgcgcggggatgcggagacccgagcgggttaggacctcagtgctgagcagctggccgggatgcggggttggggagttggggcggactgcgctcagatcccggctcccagagagccccagggccggggcgagggcagaggccgggccggggcggggagaggcggggtcaggccatggagcaatcgcgcggaccgcggagccagtgaccgcccttcccttccggggcgcagctcgggggctcccaagccggcggcctcggcgtccctgcggcagacagggcggcacccgcggctcccctttcccgctgcgcgaccctcgctgccgggccgggcctgcgcgcaggtgcggagctgcgatccccgccccgaggcggagccagcccggcccccagcggcccagcccccgcgtctagtctgccgcaccagccaggcgtctgtccctgcgtccgtgtgtccgtccgtcggtccgctcgcgccacgatcagggcttccgggggccaacaagggggcgtcggtaccccgccgcacagaggcggcctctgcctcggcatgaagtcccgcagggacaagctgcacatcccggcgctgaccctcgagtgagtgttgggcagggcgggggtatgcggggtgcagggaggacaggatgacaactaccctccccccacgtctctgttcgtgtcgcccagaaacgcaccgccgcctccggggagccctcccgggccatcggtctggccccgccctcacgtcctgagctgaacccagaatccccggtcttgggcccctactccctgagggaaccgcagccgccatccggagatccggattcggccacacgaaggggcggccgccaggttcaccgtccccggcctctttctttgcagtctgtctccgagcagccagagcccgtccctgctgggtcccagcagcccctgcagcccctgtagcccctccttgggcctgcacccctggaggtaagtgacagcgcgtgtgggcggggcgcagacatcgccctggcaccccagagccttggaaaccctccagactcatcggtctcctcaagatactgcaggttggtgacatcacctctctgggcctcagtttacccctccacataatggcactgcgatacgttctaggggcttaatgggaaaattccatttttagccaggccagcatctgacaggtggccaaggaaagggaagaacttaagctgttgcccaaggacttcgccaagacaggtgccggattcccaagcggctcagggcactccctgctgaattggcctggactcctgggtggtgacctcagggagaaagctcctccctctaaaacacacgcacacccaaggctgagaggccaccaacgagagccctgtgaattgagattaaccaaagtggcgccgggagaaaagaaccagggtgactgagcgctccctaaccctttcctgatccctacttcccagttaagaaaactgaggctcagagaggagatgccagttttcctgattcagtccatcccccgggggccaagcatcagggacagctttgctaccaggtctgttgagggttctactggccagttggttgactctgtgactggccaggtttcaggacaggaaggagttttgtgagctcctctcatggtttgggcaaaagtttagggagggacagatgtgaggtcaatggtgtctgttagagttatgtggcccatcaaccatttacactttagtatgaatgagctgcttaactctttccacagacttttttttttttttttttttttgaggcagagtcttgttctgtcccctaggctggagtgcagtggtgcaatctcagcttactgcaacctccacctcctgggttcaagcaattctcctgttgtagcctcccaagtagcagggactataggcacctaccaccacatccagctaatttttgtattttagtagagatggggtttcaccatgttggccaggctggtcgcaaacccctctgcctcagcctccccaagtgctgggattacaggcataagccacacgctgggccatccacagacctttaacggggagaagagagaacaatatagagcccacatttgggtgctgggcaacagggaggtaccttccttcagacgccaagcacttatgaggcacctactgagatccaggtgctaaaggcattgctataaagaaaacatagtccctccatcaatgacttctcagtcagcttagggaattcagtgataaaactaatggataaacaagatgtattcagacagggacctcttggggaggtgatgtttgagccaaggcctgggcacagctaaagaaagattggcaccaggcagtgggtactgcatgtgcaaaggtcctgtggcaggactgaggtggtgggttttttgtttttgttttttgagacagtctcactttgtcgcccaggttggactgcagtggcatgatctcggctcactgcaacctctgcctcccaggttcaagtgattctcctgtttcaggctccgagtagcggagactacaggcgtgccaccacgcccggctaattttttgtttgtttgtttgtttgtttgagaagggatcttgctctgttgcccaggctggagtccagtggtaccatcttggctcactgcaacctccgcctcctaggttcaggtgattctcctgcctcagcctcccaagtagctgggattacaggcacacaccaacactcccggctaatttttgtattttcagtaaagatggggtttcaccatgttagctaggctggtctcgagctcccgacctcaagtgattctcccgccttggcctctcaaagtgctgggattacaggcatgaaccaccaagcctggcctaatgtttgtatttttagtagaggtggggtttcattatgttggccaggctggtcttgaactcctgacctcaggtgatccacccgccttggcttcccaaagtgctaggattataggcgtgagccactgcaccccgcctgagattttttttaagcctctgtgtctgccttggggggagaaagttctgctggggccaggaatggaggtggccagagagaaggaggtggctaggacaacatccaggaacaagtcgaggcatccactgagaatcagagactgccatcacccccatttagtgaagaaaacaggggcataggacctcagaatgtgttatcaggagcatcctaggaaggtttcgggccagatctgactctgtctaaatccttggcttccaccccaggtgaggacatgatgaagggagggacccgtgtgttggaggccgctgagcagatttgaccagttttaactgggaggggagggaggaagtatctgggactgagaaaggccataaggctgcctcactcaccaccggggggcagcagagccacattgccttgggcctggcgggggaatgggtccctgcctgccatgttccaagcatcctaggaataagctcataaacgtcccaacagagtccagcctctgcaactcccctgcctcctttttttttttgagacagtctcgctttgttgcccaggctggggtgcagtggtgtgatctctgcttactgccacctccgcctcctgggtcaagcgagtctcctgcctcagcctcctgagtagctgggattacaggcatgcaccactacactcagctaacatttgggtggttttttttgtttgtttgagacggagttttcctcttgttgcacaggctgcagtgaagtggcacgatcttggctcactgcaacctccgcctcctggattcaaatgattttcctgcctcagcctcgtgagtagctgggattacaggcatctgccaccactcctggctaattttttgtatttttagtagagatggggtttcaccatgttggccaggctggtctcaaactcctgacttcaggtgatccacccgccatggcctcccacaatgctggaattacaagcgtgagccactgcgcctggcctgatctttatatttttagtagagacagggtttcaccatgttgaccaggctggtcttgaactcctgacctcaggtgatccacccgccttggcctcccacggtactggaattactggcatgagccattgtgcctggccttgcaacttccctgcttccatcctatccatctccccgtcgctcacttggctccagccacatggctgatcctccagaatgcaggctggtccagcctcagggcctttgcacttgctgtccccactgcccagagctctgttccctcctttcttcttccgtcacatcctcatcaaggcctcagcctcagataggaagccttccccaaccaccccctccttccaggccccacaaacatggggtataatatgcattatacctgtccatttccacatccagaccccagggattttctttttctttttttttttttttaagacagtcttgctctgttacccaggctggagtacagtggtgcgatatctcggctcactgcaacctttgcctcctgggttcaagtgattctcctgcctcagcctcgagagtagctgggattacagacatgcgccaccacgccctgctagttttgtatttttagtagagacagggtttcaccatgttggccaggctggtctcgaactcctgagttcaagcgatctgcccatctcagcctcccaaaatgttgggattacaggcataagccacggcacccagccaaccccagagatttaatttccacattgtcttgtgtgattatccagttatttttctcacccagaggtttgacagcctctccgagaccagaccttgtctgtcctggtcatatcgtagactcagggcaggcccagggtgtatacagcaggtgctcagttaatgcatgtggcttagatgaatgggcagtatctgggagggctgtccttgtggtagtgatagcattgggggttgggggtgttgttgaagaaggccatgagttgggcgctcataggcaaagtggctgttccaggcagcaacagcatcgtcagagacactttccttctggagcctcaaatcccaagggcaggaagaatgtggattttctacctagggcactaggagccatagagtgtggtgctgggagcggcacagatatatgggcaggtgggaagcgctggggtagtcccactaaaaagggaccgttgaacgggggtgtctgtatatctacctgagactttggcatttacagtcacagcacatgcagggagagtcaaatgccaatgtcacagagtttgtcagggacagggctaggatatgacccctgggagagggattcacccaggaatgcagttttgttttgctgtgagagcaatagggagccatggagggtttgtgagcagggggaagggcatgatctggggagcagtgggccgacaccagagatcagtggctcagccagcctttcatggaaggccttcaccgtggcagcaggccctctggattgtcagctgcagccctgttttgcagagggggaaactgaggacaaatgagcatgggagaaggttctctccctgctacagatgtcagggcagtgggtgtatgtaatagggggtgtgtaggtgttactgggtgtagctgtggctggggacgagggggcagcgcctttaccgagtgtgtgcaaaggtgtgtccccgtgcatatggggtggctcagcacgtagtgacagcaagtggagactgtggccccatccccacttgggtccccagactcaagagaatctgcaccccgcatgaggcttgggctgcatacctgggggtcataggtgaccactcccatactcatcaccatctctggtggtctcaaaaccaccatctcccctggtctcaaaacaagtcccaaatccacccacttttctccacagcttcaatattcccctcccagacaccgtcccagacccttactggcctcctgctaccttcattcctgtcccccagcagtctgctccccatagcagacacaagggggtttacaaacgtagtccacatcataccctttctctgctcaagcaccctccatggctccccattgctcctacaatacaattgcactcctccctgcagcccacaaggcttatgtggtcagccccgctggcattttgccctcagtgctgcctcagagagttgtgccctttgcctgggacacgctttctgcatagccagctccttcctcctccatttctggctggctgcagcattacctcctctgagaggcctcctggctaaagtcgccccttgcagtgttctctcctttctcttcccttctcagccttggtatttgaaattatctttttttttttttttttttttgagacggagtctcgctctatcacccaggctggagtgcattggtgtgatctcggcccactgcaacctccacctcccgggtacaagtgattctaccacctcagcctccagagcagctgggaatacaggcatgcaccaccatgcccagctatttcttttgtacttttatttcttttattttttatttttttttatttttttgagacagagtttcgctcttgttgcccaggatggagtgcaatggtgctatctcagctcactgcaacctccgcctcctgggttcaagcgattctcctgcctcagcctcccaagtagttgggattatagggacgtgccaccacgcccagctaattttgtattttttttagtagagactgggtttcaccttgttggccaggctggtctcaaactcctgacctcaggtgatccgcccgcttcggcctcccaaagtgctgggattacaggcgtgagccaccacgcccagccgaaattatcttgctcattgaattgtttcctgttggctgggcaaggtggctcacgcctgtaatcccggcactttgggaggccaaggcgggaggatcacctgaggtcaggagtttgagacgagcctggccaacatggtgaaactccgtctctactaaaaatacaaaaaaattagctgggcgtggtggtgcaacacctgtaatcccagcttctcgggaggctgagacaggagaatcgtttgaacccaggaggcggaggctgcagtaagctgagactgcgccattgcattccagcctgggcaacgagagcgaaactctgtctcaaaaaaaaaaaatttgtctctttagctatgaagcctgggccccagcattgggcctggactgggtcccaaagtgtcctgtggcccaggaaggggcatccctcatgatgacactgcccctgacttgcctgggctgtcatgacaggaggaagcattaattcagtccttacggtgggagacacttctgcttccatagtgaacacatattgtaccctcagccctgttccaggctctgtgtctcagattttattctgttttcagtatgggggatgttacgcatggggaaacagaggcctggaagttagcctgatgctatcgtttatagagataaattatatatagatatggaacatataccaggtgcccttggaagcgcccccttacatctgatttgtgtaattctcatgtcagttcagttttcctccaatttcacagttgaggagactgaggctggagttcaatcaggtggctgcttcctaactgaggcagggctgatggcctttcccgccacacacagacagagcatgtcagacgccccgactcaatttgccaaacacaccctctatgccagtccggtgctgggagctgctgggaccctaaggagcccccagcctggggaagacatagccggacagacaggaaagcgggtttttcagaggagaggacgcagttttgccaggctagattccaagcagtggggccagggtgggcgtggtagcatgagccggccaggacgctggggtgggtcttgggtgccgcactgagaaggggtcagtgctctgggagagaggaaaaagatggagggagcgattagatttacattttagcagaaaggagccaaaatgcctgcccctagctcgaggttaaggtgctgccaacgccccgcccccgccgcccgcggtcgtagcaacgcccggcctcagccgcccgcggccctagcaacgctccgcctctccgcccgcggccatggcagcgccccgcccactcgccggcacgcgggtccgccggcctcgcttccgcgtcgctcgctccgcctcccgacaggccccgcccccaacggccccgcccccgcactcgcctgggcggagttccagtcgcgctcgggggcgcgcgcttccttctcgccgcccccccatccccgcagccccgtgcgcccccctccctgtccggctccgcggggctcctggggccgatcccaccgccgaggcctcccttcccggcctcgggcggctgcggcggcacaaagggaagcagcatgtccgaccccagctactggacggcggtggcggctcccggccatcggagccgcctggcaaaaggcgcgctgctgcagcgctccaagaggtagggggcacggcgccggcgaaggctcggcggccagccgagcaaacaggagttgccagaagtgtgtcctggccgcgtggcgcggaccacggcgagcgtctgtctgtggcagcagtgggaaggggggaggacgcctgtggatcgaggtgtcccctggggtccctggcaccctcctttcgcccctcgttccctggactggggtgtctgtccgccagcgtcgcagctggggtggtgacagacaggagtgagttgagattgagctaggatttgaacccgggtgtccagggctgggcagaaccagggaggaacttcttggaaaaactgaggctgatctgccgctgggggtccattcagcagaaatgttggctcagaagcaaatatttactgcacgaggctggcatttgggtggggtgtcaggagtccagatagttggggttaacccccgccaaagcctcaccgctcttggagtctcagtttccccttttgaaaagcagagaggataagtgagggctgtggattctaccagacctgggttcaaatttcgactcagccactaccaggctgtgtgacctcaagtagctccttaacctctctgtgcttgggtttctcattggtgctggactggggcaaagtctgggcggtgggaccagctaccgaaagaccttgaatgctgagtccagggcttaaacttacctccaagatcgtggggagcattggagggggaatatgggtgccagagggatgaggtgcaggaggctggcttcaggcccctgctttctgccacattctctctgttgtgtcctgggtaccaagagaggatcgttctcaaatggcaacttctcgaggtcctggatctcctccaggaagagttgaacaaacagtcggccctgcatagatgcttgggaagtgaacagatgatgcttagttctcctttgaggcctcacatttggccgtgttttcaagaagacctcgcccaagaacaggagggagggcaacgaagtgtttttcccaaatgcttttggaagcagcaagtgatacagcaggatcggggagggagggtgctggtggtgcagtgtgggggcgaggaaccaggtgaggggctgggagaggatgtggagacagccaggtgagcgtgcattgaggggttggcaggaagttttgcagaaacctgtgggtttcacttttgcttctgcagctcaggctgggagacaatcactgtgactgttgacatctgtggcttcagtttcccagtctggaaaatgggctcagctggtcattcccaactctggggcttgttggaattggcagatgttggggatgtaattcactcaggaggcactggctgccctcccggcgtgagccaggccctgtgagcattgtctaggcaaagacaacagtgtatgtacccgagtccgacccaaagctgagcactggatgtggtaggtttcatccttcaaggtagagatgaggaaacaggctcaaggggcagccacatgtggagacgtagacaggctgggcctcttctccctgcccaccttgtcacctgtgtcctttgatgatcatacgcttgttctcccatggattgacctgctccgagcattctgcctgggaccccatttctgcacctcggaggccccgagacttcatctctccctccccgcgagattctcccgccgctgagctgcgttggcggcttggggtgtgtgggctgatgctcttgtggagcagagctgttgctgggcaactgctctggtggggcgggggacggtgtcgctcccaacttccttctgtcaaggtgtgggctgaggccagggcccaggtgggagaagaagccaggcagggtgtgagagacctgggccagggatctggtggccagaagggaactgggatggaaagaggaaaacgtgggcaaaagttcagcagaagaggcaggactgtgaaagaggttgcatttagggtttctagttgggtcacattggcattttaggggcatcttgagaagaaggagggttgtcaagagatgggagcaggggcttcaagaggggtatatagaatggggtgtctcagcccatatctgggctccagggtgtgtttggttcacctgatttgctggtgctgctggcagtagccatggtacagggaaaagtgtgggggtgggactgtgacacagaaccctgaaaagctggtccaggggctcctggccatatgtagtgtcctccatcaggctagaagcacttcatgccattgctgttaataacaacactgccaatagtttgtgttggtttttgttattgtttttcagatgaagtttcactcgtgtcgcccaggctggaatgcaatggcactatctcagcccactgcaacctccgcctcctgggttcaagtgattctctgccccagcctcctgagtagctgggattataagcatgcactaccacacctggctaatttttggtttttttgttttgttttgttttgttttgttttttgagacggagtttcactcttgttgcccaggctggagtgtaacggcacgatctcaccacaacctccacctcctgggttcaagcgattctcctgcctcagcctaccaagtagctgggattacaggcatgcatcaccacgcccagctaattttgtatttttagtacagaaagggttcctccctgttggtcaggctggtctcaaactcctgatctcaggtgatctacccacctcggcctcccaaagtactgggattacaggtgtgagtcaccatgcccgacctaatttttgtgtttttagtagagacgggtttcaccatgtttaccaggatggtctcaaactcctgacctcaggtgatccgcatgcctcggcctcccaaagtgctgggattacagggatgagccactgtgcccagccttgtttttgtttttttaagagagagggccttgtgctgtcacctaggctggagtgctgtggcaccatcatggctcacggcagccttgacctcctgaggctcaagcgatcctcttgcctcagccttctgagtagctgggactacaggcgtgcaccaccacacccagctaatttttaaattttgtatagagacggggtcttgctatgttgcccaggctggtcttgaactcctggcttcagaggatcctcccaccttggccttccaaagcactggggttactggcgtgagccaccatgcctggccagcagtagtgtcaataataaggaatgttagttgaggggtgattccctcctgggccttgaagacctggctaagggccatgggggaacccagctgggggcagagtgggagtggccatgtccaacatcccatccttctccagaacgggctgcgagtgtgatttaggctgggcaggtggcttagcgcggggccctgggcagccacctaccctgtccccttttccccccacagctgccgcagcgggaaccgcaagagcttggtggtaggaacgccctccccgaccctctcccggcccctgtcgccattgtcggtcccaacgggtgagtgtgggagcagccagcgggtgctgtgtcctgcctctgccccgctgactcagtttccccgcctcctcctcagcaggcagcagccccttggatagtcctcggaatttctcggctgcctctgccctaaatttcccctttgcccggaggtgagtgattgccggctttgggagacagtgcgggcaccacgggcaagggttgggcaggggcacgtgctcggtggctagacctggctcctcattcatttcattcaccttttcccctcccctggcccgtctggtggtggtctccccctctggctcccattcccggcaaatgcatgccatcttgcagccacatcccacgcatggacaggtaatttcaaccagcccagggggtggggggtcatggggggatatagccctaagaatcattaactcactaaagaaatcattcattcattcacttaacaagagctgattgagcacctgtcatgtgccagacgcttgcatttcatttatttattcatacaacaacattcattaagcacccactgtgtgtatgctctgtgctgcgggctgagggcatggtcgcaaatgggcagctggccctgagcccctggggagtcctccgtttggtggggggtggtcaatgtgtgccccagaagctacagctcagaggttgaagctttgacaggggacacagtggcagctggactcacgggggggcttcctggaagaggtacctaaagagagagagcatgcagtggacttggtcagcctgtgtctctgttcttggttattttcaggagatccttcctacaacagggccagaatatgctggccacagtgtctgttcttagtccccacaaaccacaggggccaggccttccttccatctgttcttgttcccctctccagggcagacggcagaagatggtccctcgcgtctctcccatcttccggctatggaaccaacacacccagctccaccctctcggtacccatagccccaccttggcaggtggacaggcagatgccgggttgtggggggacacatctttgtgtgtttttttcaaggtgttggatagttgtgcagtcagcaaacatactagttacttcctccatgcacgccccattctgggaaatgcagggtcccctgagaagacccagccttggccccaaaatagtccctggttggggagatacagatatcctcagcctatggggtcagggcctgaccagagggggacttggggctgcccaggggtacaggcagagaggacttcctggaggagagggcatcagagctagggttttgagggatgcataggagctaggcaggagaaaggatgttaccttctgatggccagcaggcagcctgggccttgaggggtggtgctgggttcctggccacagcactgacggtgaactcatggctctgatccccaccactctctaccagtcaagctcatcctcccgggaacgtctccaccagcttcccttccagccgacgccggacgagctgcacttcctgtccaagcacttccgcagctcagagaatgtgcttgatgaggaaggcggccggtcaccccgcctccgaccccgctctcgcagtctcaggtgggccgcgacctctggccccagccccggcccctccctgggctggtgtggaggcccaagttgtggctcctccttcaccccagccctgaccctgcctgagcctagcctctgattcttgtccctcaaccctggctcagatcccccaacatcctcccctggggttggtctcaggtcccatatcacaagccagctgtcttcctttcagcccgggccgtgcaacggggaccttcgacaatgagattgtcatgatgaatcacgtgtaccgggagaggttccccaaggtgggcagcgcctggcggctggaccagcccctgcacttctttccacattgctgtccctccatggaactctgtcttcctggctatgtcccctttgccagtctgttcatttctgtctttccttccccttccgttgaaagatgtcgttcctcctgcaccagccctcccacccgatcgccccattgccccatctcctctctccccaaccatgcctctcctgccccattctgcgtgtgtcactccagccccgccctctgaccaggtcgccccgtctcgccccacccaggccacagcacagatggagggccgtctgcaggagttcctgacggcctacgcgcccggcgcccggctggcgctggctgatggcgtcttgggcttcatccaccaccagatcgtcgagctggcccgagactgcttggccaagtctggcgagaacctcgtcacctcccgctacttcctagagatgcaggagaagctggagcggcttctgcaggatgtgcgtggtttttcgcatgttgaggttttgcatgcagtgggacgtggagtgaggggggtccccaggccagacggtgctgaggacctgtgggtgatgccacgacccacctcccccaggcccatgagcgttcggacagtgaggaggtcagcttcatcgtccagcttgtccggaaactgctgatcatcatctcacggccagctcggctgctggagtgtctggtaagtttctctttctacggccagcttggggtccaggcagaactgagattgggaccacaacagtcctgccaagatacaggtgacagttcccatcgtgtagggctttgagaggaacacagggtgctattgggctagcgtgggcttccctaaggaggcagcgggagtggagacccagtgggtgagctgggaagggtgctccaggcagagggaacagcatgtgcagaggcctgcaggtggaaccaagccctgggtgaccagccctcctgtgcccctaggagtttgaccctgaggaattttaccacctgctggaggcggctgagggccatgcgcgggagggccaaggcattaagactgaccttccacagtacatcattgggcagctgggcctggccaaggaccccctggagggtaagccgggatgggaagaggaaaccaaggctgggaaaggccggatggaggccaggcacggtggctcacacctttaataccagcactttgggaagctaaggcgggcagatcacttgaggccaggagttcgagaccagcctggccaacatggtggaaaccccccccctactaaaaatacaaaaattagctaagtgtggtggcgcatgcctgtaatcccagctactcaggaggctgaggcacaagaattgcttgaactcaggagatggaggttgcagtgagctgagatcgcgccactgcactccaacctgggcgacagagcgagaccctgtctcaaaaaaacaaaaaaagaaagggcagatgaagccaggattcaaacccaggcccatccgattccagaaccaccgcactgttctttgtctctctgtggccttgctcttaggtcacctgtgggaattatgctgagaccctctgatcttttggggcccaggggcctcagtgtcctcaaatgccacgttaagatggtcaggaagcctggggaccagtgttagcagtggccttccctttgtcctgcaaattcacaaatgactttaccaatttctgtggcctttactgtggcccagaaagtgaacttggagtcaaacaggacaacccgtaggtaagaagacggtcaaaaactcccacagccggccgggtgcggtggctcacgcctgtaatcccagcacttttgggaggccgaggtgggtggatcacaaggtcaggagttcaagaccagccaggacaacatggtgaaaccccatctctactaaagatacaaaaattagccgggtgtggtggcgtgtgcctgtaatcccagctactcgggaggctgaggcaggagaatcatttgaaccctggaggcggaggttgcagtgagccgagatcacaccacttcattccagcctgggcaacagggcaagactctgtctcaaaaaaaaaaacaaacaactcccacagccagccaggtgcagtggctcacgcctgtaatcccataatcccagcactttgtgagactgaggcgggtggatcacttgaggtcaggaattcaagactagcctggccaatatgcagaaactccatctctactaaaaacaaatattagccgggtgtggtggcatgtgcctgtagatcccagctacttgggaggctgaggcaggagaatcgcttgaactcaggaggcagaggttgcagtgagccgagatcacgccactgtgctctagcctgggtgaaagagtgagcctacatttcaaaaaaaaaaagatgtagctgggtgtagtagtgcgcgcctgtagtcccagctactcaggaggctaaggtgggaagatcgcttgagcttggcaggttgagactgcagtgagctatgatcacaccactgtcctccagcctgggtgacaaagccagaccctgtctcaaaaagagaaaaaaaaaaatttccacaaatagccaggataagaggaactgaaagctggagcattgaacttggacctagcctggtccagcagtagccagggggaggctctgggaggaggcagtgttcaaactgaggcctggagggcaggaggtgaccaggttgcagatccaaaggaaagagtgaaacaggcagcataggcatagaccctaaggttggaccatacctggagtgggactgacctgccactgtccccattgaaagctggggaggcccggcatggtagctcacacttgtaatcccagcactgtgggaggccaaggcaggaggatcacttgaagccaggagtttgagaccagcttgggcaacatactgagatctcgtctctattaaaaaaacaattagccaggcatgatcgcacatgcctatagtcctagctacttgcggggctgaagtgggaagactgcttgagcccaggggtttgaggctgcagtgagctatggtcgcacaactgcactccagcctgggtgacatagcaagaccccatctctacaaaaagtaatttttttttttcttttttgagacagagtctcgctctctcgcccaggctggagtgcagtggcacgatcttggctcactgcaagctccgcctcctgggttcacgccattctcctgcctcagcctcccgagtagctgggactacaggcgcccgccaccacgcccggctaattttttgtatttttagtagaggcggggtttcactgtgttagccaggatggtctcgatctcctgacctcatgatccgcccgcctctgcctcccaaagtgctgggattacaggcgtgagccaccgcgcctggcctacaaaaagtatttttaaaaattagccaggcgtggcggtgaatgcctgtagtcccacctacttgagaggctgaggtgggaggattgcttgagtttaggagactgaagctgcagtgagccatgatggcaccactgcactccagcctgggtgacagagcaagagcctgtctctgaaataatcatacttggccgggtgcggtggctcacgcctgtaatcccagcactttgggaggccaaggcgggcagatcacctgaggtcaggagtttgagacgagcctggccaacatggtgaaaccctgtctctactaaaaatacaaaaattaggctgggcgtagtggcttatacctgtaatcccagcactttgggaggccgaggcaggcggattacctgaggtcaggagttcaagaccagcctggccaatgtggtgaaaccccatctctactaaaaatacaaaagttagccaggtgtggtggcaggcgcctgtaatcccagccactcgggaggctgaggcaggagaatctcttcaactcaggtggtggaggttgcagtgagccaagatctcgccactgcactccagcctgggcgacagagtgagactgcgtctcaaaaaataaaaatacaaatacaaaaattagctgggcatggtggcacacgcctgtaatcccgtctacttgggaggctgagacaggagaagcacttgaacccaagaggtggaggttgcagtgagctgagatcacaccactgcactccagcctgggtgacagagcgagactccatgtcaaataaataaattaaataatcatactaataaaaaataaagctgaggaaactgaggctccaggcagataaggctgagcagggaatcaaacccaggtgtacctaaggccagatcacatgtggtctgtggctggaccatgtttgccaggcattcgctaggggctgcccctctgccaaggcctggggcaagaacatattggaccctccacctgggctgcaccctgagctgaggaagatgttaggagctgacacccagggggcctgtgtctcatcccgtcttcacaggctcaaggctcagagcctaagtttgatcatgactgagcacttcagagccagggcagcccactggcccttctagaaggttcctaagtcattgcttcatccagcctcccggatgtggcttcatgacagtgtcatgagagctggtcaggggaggcactgcatccccagcctggggtgagaactctagaggcctcaggaaattgctgggtgatgcagggtgaggcagggaggctccagctgagcctcctccctcatcttgcagagatggtgccactgagtcacctcgaagaagaacagcccccagcacctgagtccccagaggtgagtagcagaggctgggggacccccgctcatcttgttctttccagagtggaccaggcacccgcagaaagggctgggtttgccgaggtcttgcatgtagcttaattagcatcggtgactttggaggcaaggtgacggcacgtgggactgccctgccttggaagtcgggtgggggcagtgctggaggggcactggacaggtgagttttgcaggacgtgtaagaatttcccaggaggagggcacagctgtgagcaaaaaagtacagaaagtcagaagctgagttggagaagtttggacaggggaggaggtagcatcgggcaccaggaccagtggtttgggcttgggggcaggagaagccttcccagctctgcagcggggcaggaccctaagcccttcccatcccctagagccgcgccctggtcggccagtcacggaggaagccatgcgaaagcgactttgagaccatcaaactcattagcaacggagcctatgggtgagtccctgagtcctgcatagacccatttcacagatgcctgaggggatggttgaggcccaggcagctcctgcatccccctcctaccccagcagggctcacacattcatccttgaatgggcagagaaggcacctgaggactggagggggaagtggagacacgccatagcgaggttacagcctcatgtgtgctctgtccacgagccaggcctttacctgccccaggtgtagggcgttctaggggcttgggggctgatcaaggaaatagatgcccacccagtgggagtagcacgcagtgagctttatttaggtgctgctttgaatggcaggcttgcatacaagggaagtccctcatagcataagccttttggaggctgaggttccaggagtcaccatcaagagggagaggccggcaagggaactccccgggcagagggggatcagagagggggcttacatgtctaggtgatgttgttcaacagcatgggcactcaatctctgggtcagagactccctgcagggtggtagcagcttagggtcttgaaatccacaaagttcatcttatccatggctcagagatggtgcagtttcacgagtctgcaaagcagacaggctctcagtggctaaaattttgcttacttggtctgtgtgtaaaacaaacggatgtgtaaaactttgagtttggtgctagcggtcttttaaaagagctagaccaggtgcggaggcactttgggaggccaaggtaggaggatcgcttgaggccaggagttcgagaccagcctgggcaacatggcaaaactccatcaatactaaaaatagaataattaactgggcgtaatggcacatgcctgtaattccagctacttgggaggctgaagttggaggatcacctgaacccaggaggcagaggttgcagtgagccgagatcaccccactgcactccagcctgggtgacacagtgagaccatctcaaaaaaaaaaaaaaaggaaagaaagaaagaaagaaatacacaagcagccaggtgcagtggctctcgcctataatcccagcactttgggagcccgaagtgggagggtcacttgaggccaggagtttgagactagcctccacaacatagcgagaccccatctctacaaaaaatttaaacattagccaggttctgttgtgggaggatcatttgagccgggggggtggtaaagactatagtgagccgtgatctcatgactgtgctccagcctgggcaacagagtgaggcgctatctcaaaaaacataagataaaataaaaataaaagaaacatacaacctagaggccaatatacaagggccatgtgcagcccatttatatggcccccagccatggtggcttaaacccaaaggtggctgctctgggagggggaacaggtaaggagaatgggtggcccaggtggagggcacagcacaggcaaaggccaggcaggttgggatctgggctcaagttgagctgtagtgcctgctggggcctcgatctccggtcccagcaagcctggccctctgtccccagggccgtctacctggtgcggcaccgtgacacacggcagcgctttgccatcaagaagatcaacaaacagaacttgatcctgcgtaaccagatccagcaggtctttgtggagcgtgacattctcacctttgccgagaacccctttgtggtcagcatgttctgctcctttgagacccggcgccacctatgtatggtcatggaatacgtggaaggtacgctcactggggcttgcatgcctccagcgatggggagctcacccctccacgcctgggagaaaatttttagaccaagttgaggtctgttctgtcctccatgaggtctcaccctgctttggggaaccctcaggaaccccagtctggggtagggagcccagccatgggggtttagggctggaggagcccagacaggagtgtgtgaggatgggaccctggaggcaagaggagggtggccatcctaggtggggggaactgatgggcagaggcctggagaccagaagtgaaggcagggagatgtatggttcaggcaggtaaagtactattaccaaagtactgccaggcgagagagcgaacatgcacttaggagacaccagctgtatacagcactaattgctgccctgtcggggagaatcagaaggcagggtctcagcttggcgcgctggctcacgcctgtagtcccagcactttgggaggccgaagtgggctgatcgcttgaggtcaggacttcgagaccagcctaagcaacatggcgaaacccccattcacgcctatagtcccagctactcgggaggctgaagcaggagattcgcttgaactctagaggcggagcttgcagtgagccgagactgcgccactgcactctagcctgggcaacagagcgggcaacagagtgagactctgtctcaaaaaaataaataaaaatttaaaaaataggccaggcgcggtggccaacgcctgtaatctcagcactttgggaggccaaggctggtggatcacgaggtcaagagatcgagaccatcctgaccaacatagtgaagccccatctctactaagaatacaaaaattagctgggtgtggtggtgtgcgcctgtaatcccagctactctggaggctggggcaggagactcgcttgaacccgggaggcggaggttgcagtgagccgagatcgcgccactgcactccagcctggcgacagagcgagactctctctcaaaaagaagaaaaaattaaaaaattaaaaataaatgaaggtagggtccgccccttccctctcccccgaccctccccgctgagatagaacaaactggggaccttttgcaggaggtaaagcgaggaggatgcataggcattgggcataacctaaggggcgggcggggggcgggggtgccccgggcctcatgactacatccgcccttctcccaggcggcgactgcgccacgctcctgaagaacatgggcccgctgcccgtggacatggcccgcctgtacttcgccgagacggtgttggcgctggagtacctgcataactatggcatcgtgcaccgtgacctcaaaccagacaagtgagctgagctagcatgagcggggcctcgcggagggcggggccagagaggatcaggggcggggccaaagaggatcagggcagagcctctgaggtgcatcccgggacccttcaggagccccatctgtctgagctctgttggtacctcctgacaggaaggcagggaatgagcgcatggtgaacatcttgtgtgtacagaggagaggagagcagacacttaataggcgtctgctgtatgcaggggaaggccggtgcacttatggaggtgctgccaatccaggggagaggatgtgcacttaggatgcacacactgtatacaggagaaggggctgcgcacccagagctgctgctgcacaaggggagagaacatgcacttataagacaccaactacacacacagaacaggattatgcaatttgcgagaccttacatgtaaagacagtgaccgtgcatgtcttgagcacctgctgtatattagtgcaggaaagcaaggaagagaacgtgtttactgagagccttaggatgtttattttattctggtaggtggtaagcacctactgcatgccagaccctctgtgggcaactgggagacacagggccacctgctttgaaacccctgtattattttctcctctgcatttattgagcgcctgctgtgtgcagggaaaaaggaatgcctgtttgtcaggtgtcctcgagatacgaggcaagaactgacatttctcacatacatgtgtggagatgtgaacatgagtgttaagagccttgcatgtaggccaggcttggtggctcacacctgtaatcccagcactttgggaggccaaggcgggcggatcacctgaggtcaggagttcaagcccagcctggccaacatagtgaaaccttgtctctactaaaaatacaaaaatcagctgggagtggtagcgcgcacttgtagtcccagctactcaggaggctgaggcaggagaatctcttgaacccggcggaggttgcaatgagccaagatcgtgccactgcacccaagcctgggcgacagagcgagactccatcttaaaaaaaaaaaaaagcgcctcgcatgttttcagggcattttgcagttggcaagtggcttagaaaacagacatgtatgtggcacctgctgtatacttgggcctgtgctcgatgctctaaggaactcagaagcatgaataactccttacacactaacgttgggtttctatatcacattttcttggttggcatgtacttgttaggcaccaggtgtatacaaaataggcagaagaacagttattaggcaatgactgtgtacctggcccagaacactttatctttatttatttatttattttttgagacagggacagtctttgtcgcccgggctggagtacagtggcgcagtcttggctcactgcaacctccgcctaccgggttcaagcaatattcctgcctcagcttcccgagtagctgggattacaggcatgcgccaccactacgcccagctaatttttttttttttttttttttttgagacggggtctcactctgtcgccaggctggagtgcagtggtgcgatctcggctcactgcaacctcagagtccctggttcaagcgattctcctgcctcagccttccaattagctgggattacaggcatgcgccaccacgcccagataatttttgtatttttagtagagacggggtttcaccatgttggtcaggctggttttgaactcccgacctcaggtgatctgccggcttcggcctcccaaagtgctgggattacagttgtgagccactgcgcccggcaaatgaactcatttttaaaactctcacgcaagtacagtatatactgctgtttaggttttcctatggacttaaatatataaatgttttgctacatcatagtgtcttatgcaccagctgtatgaagtcgcatttccgtgcaccttctgggtgcatctgccacttaaaaatacattccagagaattcactgtgtataaccatcatttaatgaactatgtagtcagtacctcctgtttgctccagctctgtaaagaaacaattctgtgccggcactttgggaggccgaggcaggtgaactacctgagatcaggagttcaagaccagcctgaccaacacggcaaaaccccgtctctactaaaagtacactaaaaaaatatatatatatatacacacacacacatatacgcacacacagtagagaccaggcatgctggctcacacctgtcatgccagcactttcaaaggtgggaggattgcttgaggccagcaattcaagaccagcctgggcaacatagcaagaccttatgtctacaaaaaaaaccttagctgggtgtggtggtgtgcacctgtagttccagctacttgggaggctgagcaggaggatcgctagggcccaggagttggaggcagagctctgcccatctcaggcggagccaaggtctagggcagaaggggaggccaggcaccccagccccccagctctgagcacactcctaacctgcccacagtctgctcatcacctcgcttggccacatcaagctcacggacttcggcctgtccaagatcggcctcatgagcatggccaccaacctctatgagggccacatcgagaaggacgcccgagagttcatcgacaagcaggtgggcgggcaggtgggtgggcagccccgggatgcctcctcctctctcctgggacctctcttgggctgggggctggcctcagtttccccgttctccctggcccaggtgtgtgggacgccggagtacatagcccccgaggtgatcttccgccagggctatgggaagccagtggactggtgggccatgggcgtcgtcctctatgagtttctggtgggctgcgtgcctttctttggagatacccccgaggaactcttcggtcaggtggtcagcggtgcgtttcctccacgggcctgggtttgagctgcagccccaccagagctctgggcagcggtcctccacccgcatgtcagggagagaagcaggaagaggggagggagttggatgccaggtggggaggcggtggggtgctgagtgaggcgggtggctggattaattatagggtcacagaggcttcactgaagtgacttgtgaggctgggcacagtggcaaacacctgtaattccagcactttgggaggctgaggcgggaggatcatataaggtcaggagtttaagaccagcctggacaacatggtgaaaccccatctctactaaaaatacaaaaattagccgagcatggtggcgggcacctgtaatcccagctacttgggaggctgaggcaagagaatcacttgaacccaggaggcagaggttgcagtgagctgagattgtgccactgcactccagcctgggtgacagagcgagactccatctcaaaaaataaaaaaaagaagtgacatgtgagcagagacctgcaagaacctgagaatgagagaaagccatagagacagaaaagagaaaggtggctctgagcatagggcacagctgtggcaaaggctgtcagtgggtaccaagcctgccacgttgcaggggcagaggaggccagtggcttggagtacagtgaagtgaggggaaatggtggatggtactagaaaggggtaccctgccttctccctccctccctcattttacctccctccctcattttagatgagatcatgtggccagagggagatgaggcccttccagcagacgcccaggacctcatcaccaggttgctccggcagagcccgctggaccgtctgggcactggtatgtagtgtgggggagaacccaggtgggtggctccttcaggccctgggacccagggaatggagggatagcgcccggggtagacaagagttctacttgggaagctgcatggaggagggggtttgcagctagggttttgaaggatgcacaggagttctccaggaactatcacaagaccttggaaagaatagaaagtagctgggtctggtgcccatatggagcactgagcctgaataagtgtgtgaggctgtaaagtcaccaggacctgtgtcaaaggcccagcccagaagatcccactgtcccagttttcccagccacctggttaatcattaagggaccgtttgagactcatgcagccacccatcacgtggccactatggctcctgttcatgactgaggctttgctatgggagacggttgggtccaaggtcggggatcatcacctgctctgtggagcagaagtgggagaagcccgggaaggaggccctcgtaaggctctgggctttctctaggcggtgtggtcccagatggcagcagagagaagggcagaatctttggaacctgggcagcctgggtgcttttttatttttttgagattagatctcactctgtcactcaggctggagtggagttgcacaatcttggctcactgcaacctccgcctcccaggctcaagcgatcctcccacctcagcctcccgagtagccggaaccacaggcatgtgccatcatgcccggctaatttttatacttttggtagagacgaaattgagacgaaatttcaccatgttgcccaggctggtctcaaactcctgacctcaagtgatctgcccgcctcagcctcccaaagtgctggcattacaggcatgagccaccatgcctggctgctggcctgggtttgaatcctggcttcgtccctctccaggctcctaaatgacagcggatttttgttcccatttttctggttctttgttgttgttgttgttgttgttttttgagacagagtcttgctttgttgcccaggttggagtgcagtggtgctatctcagctcactgctgcaatctccacctcccaggttcgagcgattctcttgcctcagcctcccgagtagctgggaatacaggcaccagccaccacacccggctaatttttgtgtttttagaagagatggggttttgccatgctggccagactggtctcgaactcctgacctcaggtgatcctcccttcttggcctcccaaagtgctgggattacaggtgtgagccactgcgcccggcccatttttctggttctgtgttgtccctactatgtgtccagcatgggcagtgggggtaggggggcatcctgtggcgggtgaggtgaggacctgcagggctcagcggggcatatctgcaggtggcacccacgaagtgaagcagcacccctttttcctggccctggactgggcagggcttctccgacacaaagccgagttcgtgccccagctcgaagctgaggatgataccagctactttgacagtaaggagggatccccctggagggggggcggggggtgctctgccatccctcagtccctgggggcagagggctgtgtgccaggcattccacccgagcttggcacctcaccttaggcctggagcttccgacttcctgagccttccaagaatctagggcgtgtgtcggccgccccctggctggatttcctgtgtgtctgggctcaggaggccacagcatccctcaggcttcagaaggagaaaccaaggcaccaagtgtggcagacccttgtctggggttccccagcaagttgggcctcctgggtgtccgtccctgaccaggcatggggccccatctgttacccaggagggtagggcgcctagtgcagcttttttggaggcgtccctgcaggggcactgtaggtgagctctgaggaatgactctctctctccccacttggggttcctgcccttcagtgtccagcacctccttcagaacttgcttcatgtcagaggtcttctctgagcttctgtttcctcttctgtaaaatgaggaacatcctttatgttggagatgcacaattttggccaggcgcagtggctcaagcctttaatcccagaactttgggaggctgaggtgggcagatcacctgaggtcaggagttcgagaccaggctgcctgaccaacatggagaaaccccatctctactaaaaatacaaaaaattaggcaggcatggtggtacatgcctgtaatcccagctatttgggaggctgaggcacgagaattgcttgaacccaggaggtggaggttgcagtgagctgagatggcactattgcactccagcttgcgcaacaagagcaaaactgcctgaaaaaaaaaaaaaaaaaaaaagatgcgcaattttacctaattctgtgtgacccatttcaaggaatcactgaagctcagaaataggaattcccgcccctggtcccacaacctgttttttttttttttgagacggagtctcactctgtcgcccaggctggagtgcagtggcgcgatctcggcttactggaacttctacctcccggtttcaagcaattatctgcctcagcctcccgagtagtcgggattacaggtgcctgccaccatgcttggctaattggtcccacaactttttaattatttattttttgagatggagtcttgctctgtcacccaggctggagtgcagtggtgcgatttcgactcaccacaacctctgcctcccgggttcaagcgattctcctgcctcagcctcccaagtagctgggattacaggcgcttaccactactgcccagctaatatttgtatttgtagtagagatggggtttcaccatgttggccaggctggtctcaaactcctgacctcaagtgagccacccaccttggcctctcaaagtgctgggattacaggcgtgagccaccgcacccggccccacaactttttagggacacagctggtgttgatccccagatatctgctctgccgcccaagcctcccgtggtccttaaacacaccaggcactgtcccacctcagagcctttgccctggcagtgaccctatcctgagatgccctccccgtattgccacaccgcccttgagatcatctctgggcatcaggcgtgctgcatgtgcctctccctcccacagcacgttcggaacgttaccgccatctgggctccgaggacgacgagaccaatgatgaagaatcgtccacagagatcccccagttctcctcctgctcccaccggttcagcaaggtgggcccgggtcccgaggggagccactgctcagaaaacattgcatgatgtctgtttgctttcgtatctgttttttgattttgctttgttttgttctgtagagatgaggtcttgctatgctgcccaggctggtctccaactcctgaactcaagtgatcctcccacctcagcctcccaaagtgctaggaattgtattggttttttgttttgttttgtttgagatggagtctcgctctgttgcccaggctggagtgcaatggcgcagtctcggctcaccgcaacctctgccttccaggttcaagcgattctcctgcctcagcctgccgagtagctgggattacaggcgcatgccgtcacgcccagctaatttttgtatttttaatagagatggggtttcaccatgttggccaggctggtctcaaactcctgacctcaggctatcctcctgcctcagcctcccaaagtgctgggattacaggcatgagccaccacacctggtcaaatttttttgtattttcagtagagatggtgtttcaccatgttggccaggctggtctcaaactcttgacctcatgatctgcccgcctcggcctcctaaagcgctgggattacaggcatgagccatcgcacccggccttgtatttttttattttgttttgttgttttaatttgcttttgttttagccattttttttttttctttttttttttttgagacagagtctcgctcttttgcccaggctggagtgcagtggcgtgatctctgctcactgcaagctccgcctcccgggttcacgccattctcctgcctcagcctcccaagtagctgggattacaggtgcccgccaccacgcccggctaattttttgtattttcagtagagacggggtttcaccgtgttagccaggatggtctcgatctcctgacctcgtgatccacctgcctcggcctcccaaagtgctgggattacaggcgtgagccaccgtgcccggcctgttttagccattttaaggcaatttccgaggcaggcggatcacttgaggtcaggagttcaagaccagcctgactaacatggtgaagccctgtctctactaaaaatacaaaaattagccaggcggtggtgggtgcctgtaaccccagctactcgggaggctgaggcaagagtattgcctgaacccccagaggtggaggctgcagtaagctgagatcacagcgctgcactccagcctgggcgacagagcgagactctgtctcaaaaaataatgataataataaagtgtacaatttcgtggcattcagcacattcataatgttgtgcaaccatcacctctatctagctctcaaatgtttgattcccccaaaaatttgtacccattagcaaccactccccatttgtcctccttcagcttccatctttatggatttgcctgttctgggcatttcatatcaatgcaattcacactatgtggccttttgggtctggcttctcttactcagcatcacgtactcaaggctcatccctactgcagtgtggaccagtgcttgcttcctttttatggctgagtaatattccatcatatggatggaacacattgtttatccacccatctttgatgcacatttgggtctattccaccttgtgaatacaggtaccattttagtttatttacttatttatttatttattgagatggagtcttgctctgttgcccaggctggagtgcaatagtgcaatctcagctcactgcaacctccaccttctgggttcaagcgattctcctgcctcagcctcccgagtagctgggattacaggtgcgcgccaccacacccggctaatttttgtatttttagtagcgaccaggtttcaccatgttgcccaggctggtctcaaactcctgtcctcaagcgatccgcctgcctcagcctcccaaagtcctgggattaaaggcatgaaccaccgcacctggccctggatgttattttataacctcacgagcttaacttacattccctactttttttatgatctgatcaaaaaatgctccactctgctttaggcctgggccccaggcaggactttctagtcaacagcaaaaacgcagcttggtagcctggcccctgagcctcagtttttccatctgtacaatgggctaaagtctatgctcttttagggatgtggggagtgaggatttagagaagtgactcatactgaagcaactggtacataggaatcactggactaagccagctttctttttttttttttgaaacagagtctcgctctgtctcctaggctggagtgcagtggcacaatctcggctcactgcaacctccgccttctgggttcaagccattctcctgcctcagccttccaagtagctgggactacaggcatgtgccaccacgcccagctaatttttgtatttttagtagagacgggttttcaccatgttgaccaggctggtcttgaacgcctgacctcaagtgatccgcccacctcagcctcccagagtggtgggattacaggcataagtcaccaggcctggtctaagccagctttcttgccacctttgttactggtttttttgtttgggtttctttttttttctttttttgagacagggttttgctatgttgcccaggctggtctcaaactcctgggctcaagtgatcctcccagctgggcctctgaaagtgctgggattacaggcatgagccaccgcacccggcttaccattcttttgtcttgcctcccaggtctacagcagctctgagttcctggccgtccagcccactcctaccttcgctgaaaggagcttcagtgaagaccgggaggaggggtgggagcgcagcgaagtggactatggccgccggctgagtgctgacatccggtaagtggcctggggaagtgtaggcagatccagcttccaagcctgctgggaggtagagacacaaaatctgatgcaaagggagcttcctagtggccaagtagaaaagggtcaaacatattgaccagcctatcaggtccctggcaaccttgctccctttggctctgtgttcctcaccatgcaaacataaaacagctgtgtaccatcatgctgctaggcacacttttccttctgtccagaatgccctttgcttactaactcctgttcatccttcaaagctcagacccaacagaaacagtcaatgtctgctagaggatgggtgttggaagctggccttttttttttttttttttttttgagacggagtctcgctctgtcgcacaggctggagtgcagtggcgcaatctcggctcactgcaagctccgcctcccgggttcacgccattctcctgcctcagcctcccgagtagctgggactacaggcacctgccaccacacccggctaatttttatatttttagtagagacggggttttgccatgttagccaggatggtctcggtctcctgacctcgtgatccgccctcctcaacctcccaaagtgctaggattacaggcgtgagccaatgtgcccggccttttttttttttctttttttaagagactggttctcactctgtctcccagactggagtgcagtggcacgatcatagctcacttcagcctcagactcctgggctcaagagatcctctcaagtagctgggactacaggcgtgcaccacggcacccggctaattttttaagcaattttttgtaggccaggtgcagtgacttacacctgtaatcccaacactttgggaagccgaggcaggtggattacctgaggtcaggagttcaagaccagcctggtcaacatggcaaaaccccatctctactaaaactccaaaaatttagccgggcatagtggtgcacgcctgtaatcccagctacttgggaggcttaggcacgagaattgcttgaccctgggaggcggaggttacagtgagccaagatcgtgccactgcactccggccggggtgacagagcgagactctgtctcaaaaaaaaaaaacaaaacaaaaaacaaaaaattgcagagatggggtctccttatgttgcccgccctggtctcgaactcctggcctcaaacaatcctcctgtctcagcctcccaaagtgctggaattataggtgtcagccactgcacccagcctggaagctgggttttaaaagttgaataggaagccgggtgcagtggctcacgcctgtaatcccagcactttgggaccccaaggcaggcaggtcacttgagctcaggaattcaagaccagtctggccaacatggtgtaaccccgtctctactaaaaatacaaaaattagcccagtgtggcggcaggcacccataatcccagctacttgggaggctgaggcaggagactcacttgagccctggaggcagtggttgtagtgagctgagattgcaccactgcacttcagcctgggtgacagagtgagaccctgtctttaaaaaaaaaggtgaataagcggtctccaggtggacagagaggacagtgcagacagaaggaactcgtcctgtctatgcaaattacccttgactgcagactgagagttaagatgtggccatgaaggtggctgagtatcctggggtgcaggtgcctggcaggggtgatgcaggctcttcctccctgcaggctgaggtcctggacatcctctggatcctcctgtcagtcatcttcgtcccagcccgagcggggtcccagcccatctctcctgaataccatcagcctggacacaatgcccaagtttgccttctcatcagaggatgagggggtaggcccaggccctgcaggccccaagaggcccgtcttcattctaggggagcctgaccccccaccagcggccaccccagtgatgcccaagccctcgagcctttctggtaagtggggccctgagtaagagggatgatgtcatggaagtttcccagaggaggggctatttgagatgggttttcaaggatgagtaggagttctccagagccaacaaaggctttaagagaggagaagccagggtcccagagagacccccagcccccaaggaaccccagtctagggtaaatgcccccagcttcatagagtcaggatgggacccctagctcccaagatgggggaactaagggtctaaatgggtgtggaggaaggcttcctggaggaggggacttgaagacttttgcatagagaataatttgggaagggagtgcaggaagagggaactgcatgagcaaaggccaggaggctggactgtgtaaatagtgaccagggaggaagggccttaaggtccctttaggaccacatggtgagtttgaggggcacccagctgaccctgctgaccctctagccgacacagctgctctcagccacgcccgcctacggagcaatagcatcggcgcccgacactccacaccaaggcctctggatgccggccggggccgccgccttgggggcccaagagacccagcccctgagaagtccagagcctcctccagcggtggcagtggtggcggcagtgggggccgcgtgcccaagtcagcctctgtctctgccctgtccctcatcatcacggcaggtaatgcccaaggcccctctcacctttgtctgtctgcacccattttcaccaacagggtgggggcccttcctgagttggggaggctggggatgagccccagaagaggggaggaggagtaggacacatggagagctggggagatggtgttcccagtagagggcactgcacgtgcaaaggcctggtggggtgaccatgcttgggacattgaagcaacagcaaagtggccagggtggtcgttgtggtgggaaagagggggccccaggggagacctgtgagggagtgagtgaccccctccctaaccccctgcagatgatggcagcggcggccccctcatgagccccctttccccgcgctctctgtcctcgaacccgtcgtcccgtgactcttcgccgagccgagacccgtcccccgtgtgtggcagcctgcggccccccatcgttatccacagctctggcaagaagtacggcttcagcctgcgggcgatccgcgtctacatgggtgatagcgacgtctacactgtgcaccacgtcgtctgggtgagtgccgagtgggaatggcagggacccgggttctagtttgactctgcccggtcatgtcccttctcagagctgcattttggagcctggcagggttaggtagatagagctggtgccaccgagttcatctcggtccctgtcatttggcagggaggaggtcagatgagagagacaaggatggatggatggaagctcacagatcccaagtggcattaacctcccagctccatatggggacgcactgggcatgttatcctccctctcccagcccaagggcgtcgaggcatgccctccctattggttgctccctgaacagacacagaaggctttctggagaagggggcgtaggagctggggctttgatgggtgagtaggagttcccccaggatcagggaaactgagacagcacaagaggcagcagcttgctggggtcccacagcagacccagcctgggctggggtccccagatgtggggcccaggccattgaccccaccgttctcgtctgcccccagagtgtggaggacggaagccccgcccaggaggcgggcctgcgggctggggacctcatcacccacatcaacggggagtcagtgctggggctggtgcacatggacgtcgtggagctgctgctgaaggtgcggcacccccactgcccaccctcagggctccccagcaccccttggccgcagctcccggttccccgtggttctccgcgtccagacacacaaccccacattcaatgtcaactccaggcctggcacatccacttccttcggcccagaatacatgtccttcttcagcccccaacatcaccccttagagctgctcctccaggaagccctcccttctccctgggcaccctcacatctgttcctccctctggcctgaggcctggaggtaggagatgggctcaagacaggaggaagggccgggcgcggtggcacacgcctgtaatcccagcactttgggaggccgaggcaggatgatcacctgagctcaggactttgagaccagcctgggcaacagagcgagacccccatctctgcaaaaaattaaaaaataaaattagctaggcatggtggcatgcgcctatagtcctaggtacttaggagtctgaggtgagaggatcgcttgggccgaggaggttgaggccatagtgagctgtgatcgtgccatactgcactccagcctgggacacagagtgagaccctccctggttctaaaaaaatagagggctctcatgtgggcagctgcatgggtggttcattgaatagctggacactgggtaggtgtctttggcctaatgactcatgggccattaggtgagtgattgggggatggggagatgttggggtgattaatgggtggataccagataggtgggtgacagaccccgggagggtggagagtgaagagggcaggcctcgatcggcgttgaccgcagagggaaggatcttagcaggaggggtggtgctccctgggctattgtttgaccggatatattgggtaggtcactggttgtgtggatgaatggatgctggggtggtgggtcccagctggtgcccggagtgaaggggacatagcagctgcctggcaagtgctgggccctgtgagaggcacagaggcaacccctcaccatccctcccgcagagcggcaacaagatatccctgcggaccacagccctggagaacacctccatcaaggtgggccccgcccggaagaatgtggccaagggccgcatggcacgcaggagcaagaggagccgtcggcgggagacccaggatcggtgcgcggcagtgaccaccagggagcggtacacagggggcggggccacggggactggggttctttttttcttttctttttccttttttttttttttttttttttgagacagagtcttgctctgttgcccaggctggagtgcagtggctcaatctcggctcactgcaacctccacctcccgggttcaagcgactgtcctgcctcagccccctaagtaactgggactacggcgtgcaccatcatgcccagctaatttttatattttcagtagagacagggtttcgccatgttggccaggctggtctcgaactcctgaccttaaatgatccatctgcctcggcctctgaaagtgctgggattacaggtgtgagccaccatgcctggccaggagcaggggttctgaagcctccggttttcttaccccaggcggaagtcacttttcaagaagatctccaagcagacctccgtgctgcacaccagccgcagcttctcctccggactccaccactcactgtcatccagtgagagcctccccggctcgcccacccacagcctctcccccagccccaccactccctgccgaagcccagcccctgatgtcccagcaggtgggtgcaccccgaccccccaccaccccggctaccctgggagcaagggctggtgggccccaggagggaggaaggagttcaggggatggaatgacacgatgtagggaaaaagatgaccgggatcctggtgtctagcagggaacctgggagtacttagagacgaatgcaggtgccagggaaggatgcacccagcagaggaaacatcatggacaaatggggctagacaggagggtgggaaaactgagaagaggccaggcacggaggctcacgcctgtaatcccaacactttgggagcccgaggcaggaggatcactgagcccaggagtttgagaccagcctgggcaacacagggagaccccatctgtacaaaacataaaaaaattaggtgggtgtgaggccgggcatggaggctcacacctgtaatcccagcactttgggaggccgaggcaggtggatcacctgaggtcgggagttcaagaccagcctggccaacatggagaaaccccgtctgtactaaaaatacaaaatcagccaggtgtggtggcacatgcctgtagtcccagctactagggaggctgaggcaggagaatcgcttgaacccaggaggtggaggttgcggtgagccgagattgagccattgcactccagcctgggcaacaagagcaaaactccatctcaaaaaaaaaaattaggtggttgtggtggtgcacacatgtggtcccagctactctggaggctgagatgggaggctcacttgagcccaggaggtcaaggctgcagtgagccatgattgcaccactgcactccagcctaggcaacagagtgagaccccatctcaaaaaacaaaagggaaaaaaaaaaagaaaacagaagtgatacagagaaggctttctggaggagggggagtaggagctggggctttgatgggtgagtgggagttcaccagagctaggccaaggaaacaaccctgagcaggaggcagaaaagtctggcatgaaccaggcatgatggctcatgcctgtaatcccagcactttgggaggccaaagcaggcggatcacttgaggtcaggagtttgagaccagcctggccaacatggtgaaaccccaactctactaaaaatacaaaaattagccagatgtggtggcacatgcctgtagtcccagttacttagggggccgaggcacgagaatcatttcaacctgggaggtgaaggttgcagtgagccaagatcatgccactgcactccagcctgggtgacagagcgagactctattgaaaaaaaaaaaattagccagccatggtgacgtgcacctgttgtcccagctactcaggaggctgagttgtgaggatcacttcagcccaggaggttgaggctatgattgagccagtgcactacagtctgggcaacagagcaagaccctgtctcaaaaacaaaaacaaccaggcatgatgggtggccacatggaaggatgtgggctttagcagtttttgtcagtcccacagctccacttctgggctggggacattgaggccagcagccctgacctacgcttatcacccacagataccactgcatccccacccagcgcatccccgagctccagcagccccgcctccccagctgctgctggccacacccgccccagctccctgcacggcctggctgccaagcttgggccaccccgccccaagactggccgccgcaagtccaccagcagcatcccgccctccccgctggcctgcccgcccatctccgcgcccccaccccgctcgccctcgcccctgcccgggcacccgcccgcacctgcccgatccccgcggctgcgccggggccagtcagctgacaagctgggcacaggggagcggctggatggggaggcggggcggcgcactcgtgggccagaggccgagctcgtggtcatgcggcggctgcacctgtccgagcgccgagactccttcaagaagcaggaggccgtgcaggaggttagcttcgatgagccgcaggaggaggccactgggctgcccacctcagtgccacagatcgccgtggagggcgaggaagccgtgccagtagctctcgggcccaccggaagagactgatcccctgccaggtctctccctggcatcaaagttacgcgttttcttgtgcaatgttttttccgtaaagtcatgcctggatggggactgagccaccagcctgacacccagaaggcgagaagccatctcggtccttgctggaaggtggagacatcgcttgtgttctggtgtcaatcggggctggatggggcaagaatgggggacaagggtggctttgtaaatagcagcaaatccctgcaactaatttattactttttttttctttttttttttttttttttgagacagagtctcactctgttgcccgggctggagtgcagcggcgtgatctcagctcactgcaacctccgcctcccaagttcaagcgattgtcctgcctcagcttcccaagtggctgggattacaggcgcccaccactatgcccagctaattttttgtatttttagtacagacggggtttcaccatgttggtcaggctggtctcgaactcctgacctcatgatttgcctgcctttgcctcccaaagtgctgggattacaggcgtgagccactgggcccagcctaatttattactttttataagcgatagccgtactgagccgccccctgaaggcggctgccaggtcttgccccaggcacctgggactctgtttgcaggccctgccctctgggctgagaaggatgcactttggacaagtcatctgtgtttgtgttttccagtttttctgtactttttaagtgttttgtgttacctggtctcattcccctccccacacctacccatttgaggggatggagttgaagtcacctggtcacctgtaccggcccagttcggctacaacctggagtgtccgtaaacaattcctctcacccacaaaacaatgtaatcccagcgatggactggattctgaaggccacttcccaccatcatagctgccatgcccaggcagtgcctgctctatatatagagtctgcctccaatcctgctggcttcagcctggagaagggatatgggagctggagctttgatggatgaataggtgttcaccggatctgggcagaggggtcatccgctccccaggtgggcactgataaaggaaggtacaggcctcacctggaactgccaaggcagcctccagaaatgctcggctgtctcggggcacgctccagtatgccagtcctgcgggattacgtccagctacttccagaaacactcagtgtcccctcccctcaggctctgccttggcctggccttgtccagtctaccctggacaagatgccgtgtgtttgaggcccagcagagtaagcccttggccgtgatgtgtctgaaacacctgttaggggttccctccatatgtcagagcctctctgggatgaagttcaagccagaaaacccagtcgaggctcaagtttgaatttcagcttcactgtgtggctctgggaaaatggctttcccactctgtgcctcagtttccttgtgtttacaagactaatcccattgactgtttattaagcacctactgtgtgccaagcgcttttacgtggcttctccctcagccagccttgagaaggctggaggtggtgtcatcacctccattttacagacaaagcagctgagaccccagcgaggggcggagacctgtcccacgatcacccagcaggagtcgtggcagaacggagcatcagccagaccctgttgtgggcgttgtcatcaagggagcttgaatggagggtctggtgtcagatacagccgactccagccccagctcatcccccatgatgctgtgtgacccactgggcactctggtgagggagctttccagacatcaacagcccactctgcttccctttctgagtcccctgtccagcactgcctagtgttggagggtagaccaaggctgtgcatgattcaccccctccttccatcctggagctggcagtgaataaaagcccgtatttacaaagatgagctccaacgtctggatttgtgaggggctgagaaaggaggaagggaagagtggggaggggagcggagtgaaatagacccatggctcaaagtcattgcaagtgggttttgaggactgcatagcagttcgctgttgagattcttcctgatgccatcgctggtaccagcctcctgctaccctctccctgcgagtactccatcatagccctgcctttaaaagcttcctccagacatctgggccctgagctatgttttttatttttatgtttttgagacaaggtctcgctctgtaacccaggttggagtacagtggcgcaatcacggcacattgcagcctcgacctcctgggcgccctgggctatgttaataaaataaataagcggcggggcgcggtggctcacgcctgtaatcccagcactttggaaggccaaggcgggcggatctcctgaggtcgggagttccaaaccaccctgaccaacatggagaaaccccgtctctactaaaaatacaaaattagccgggcgtggtggcgcatgcctgtaatcccagctgctcgggaggctgaggcaggagaatcgcttgaactcgggaggtggaggttgcggcgagccgagatagcgccattgcactccagcctgggcaacaagagcgaaactccgtctcaaaaaataataacaaaataagcaatcgtcgcgtcctttctatcctggtcttagcttgcgctctgccataaaactccctctagccgaacccggcccagccctagagcaatccgttacttccggggcgctcagccggcatgcaaacactcttggctacagccccatctccgagtgcgttcggctatttccggaaaccgtcggcatctaggctcaagtccgctaaattctagtgcccgtaggggtcgagatcgttggctgtttccggacgctctgggttgccatggaaactccttcaaccctggctttctccgacttctgctttttgcggcaggccctttccccactctactgccccctgtttgctgagcttgagaacgcctcatttgtcccctggaaccatctatgcttcagtaattcccataagctggcggtcgcctctgggtctaaactcccaaggcctccattgggcactgagcacattcggttatttccagaaacgctccgcggtcttggggatcagcctcagttgtgccagtgcggccgtagagagtgttcggccatttccgaaagcgctcgggcgtctctaagcccagccgagcccagtctcggatccctcgccgacccgattgcactcggctacctctggaaacgctcggctgtctcgggggcaccctctagtccaccagtcccgcgggattacgttcggctacttccggaaacactcgggtgcccccttacctcaggctccgcctcggcctcggttcatccgcccggctcgaatgcgctcgggcatttccgccgggggcgggccaggccgctcggaaccgtggcggcggcggaggcggggatcccgcggctgcggcgacggtggccgcggtggagccacggggcgggcttggcttggtgtgacggcggctgcggcggcggtggcggccgcgaccaggtgagtcctgactggccctcgtggcgggggcggctgggagtgtgcttaaatgcggggcgcccgggggcagtgccgggccccggtggaagccagaacgcaagcgccaggctgcgtcgggccccgcgggaactgggggggccgcaggcaagggggggcctcgggctcggctccgcagcggtgcagcctccttgggacggtcggggcagaatggggagagactccccgcgtccaagataccggactggagccgaggccccaaatgaagggaggccctgcctggaatggggcttcgaatagtaccgaggggcgcccaggcattgtgcggggcagaatggggtgcgggagggccgggggtcgaacccacttccggtcccctagccgggtggccgggtccacgcagacccaagtgcgcgtctgtgtgagcgctcaggccctgccttcacccgcggagcccccagccctgcctgccccgcccctcccgcctcccggattcggggagcgctgctcccggggcgcgcacaccggggcgtgggggcgggctggcaggcagatccaggcggttttctgggcatcccctctcggggcctcagtttccccacctgtagaatgagggtaacagaggcctaggaatgggtaaattgggcacccgagaatgtggcgcccctccgccctgctcggacacctcttggggttccccgtgactgaaggatgctcagagcctccacctgacactcgggcctcttggtggatagcacctatccttatagccaccctgaatccttgacaagcaacttaacccactgccaaggctttgcatgtgccgttccgtctgcctgtcgcgccttcctatccgctgtgatgatccattctctagaacagcacgtccatcccccgaccctagccctgtccatcacagggcgtctgaacccgcagggctaggctgggaatgtgtgcctatctccgcctccccaggctgggactcctggggaataatcaatgccctgctgccggcagcctcccctcctcctcagctgcagtacccccaccttctcctggctccctgtccctgcctggggctaaggttccttctaagcacctccccatctgcattttgtgcctactctgggccccaggctggagctacctgccagcccactcactcctcctctgcagagactggaggtccatttgcttggactcacctcgaggcctttgcttgtgtagaggcctcttcctggactttgttccctacctcttagttcagctggcctgacccctctatggagctcccaaagcacccggagtggcctccattgcgtcctccctgccctaggtatctggccacctggctgctgccccctcatgtccaactgggccaagtcggcagatctaggtgtaagtcctggcttcctcctggcctactgcacggccctagatacctccctgctctgagcctcagtttccccatctgtaacaggggtgatgaaaagcctgtttactggccgggcgcggtggctcacacctgtaatcccaacactttggaaggcagaggcaggaggactgcttcagcccaggagtttgcgaccaacctgggcaacatagcaagaccccacctctattggaaaaaaaaaaaaaaaggctgggcaaggtggctcatgcctgtaatcccagcactttgggaggccaaggcgagcagatcacttgaggtcaggagttcaagaccagcctggccaacatggtgaaacctcgtctctactaaaaatacaaaaattagctgggtgtggtggcctgctactcgggaggctgaggcaggagaattgcttgaacctgggagacaggttgcagtgagctgagatcacaccactgcactccagcctgggtgacagagcaagactctatctcaaaaaaaaaaaaaaaaaaaactgatttactgagcatgtagtatacctggggcaggttcttgggaactctactcccagcagctccaagggaaggctgtcagtatacccattttacagatagagaagctgaggccctgagagggaccggccccaaggtcacccagtgattcagggaattccaaatcaggatttgggcccatctccgtgttgggggtgagaggagttggcctggctaacgctgccctatccctgtctccctaggtcggcgtcctcagctggccgagcatggtggcagcctgcacccttggctcccttgtctggtgcagccagcagagccgccagccttgggcgcccatggccctccgtgtgagggcgtgagcggcctgccccagcctcacctgctgatggaggactcaatggcccagtgacctgacaccacaccaccaactccctcccaccagctgacgaatggtggacccagtgacgagtggcccttgtaagggtcatggaataatttgaagcgaggcatgagcggcccctgtggtcgcctgtgactgctggagatagaggtcccagcaccccaagccaacccagcggaccctcccagccctgcttcaaccaatggggccagtggggctccaagcagccacctaaccatccagaccccaccccactcacgcggccatggcgggccctgagggcttccagtaccgcgctctgtacccgttccgccgggagcggccggaggacctggagctgctgcccggcgacgtgctggtagtgagccgggcggccttgcaggcgctgggcgtggccgagggtggcgagcgctgcccacagagcgtgggctggatgcccggcctcaacgagcgcacacggcagcgaggtgacttccctggcacctatgtggagttcctggggcccgtggccctggcccggcccggccctcgcccacggggcccccgcccactgcccgccaggccccgtgatggggcccctgagccaggtgagcagcaagcaggggccctggaaaggggggtggtcccctcagacccttggtctcctcttctgtccagtgaggcaatgggatctccaaggaaggaggaaaaaggacatttggtcatttgacaagtgtcttcagtgctaggctcagcagtggacacaaggcctgttcctgccctcatgagcttctggttcaagaagggatgagagtgggttcaggaggtgacacatgccatgaggaagggggcttgcgtgggaagatgcgagggtggaagctcaaggcagtgggggcagcgagggcagaggctgtggagtagaactctaatggcgggaacggccagcaggaggaccagagggaggaaggggagggcaatgtgcgctggcatggaggacttagtgggattgattttgaggacaatggagagtgttcagtaggattcagaggctcagcctagcttcatcctgccttttgcagacagggtcccttgaagaacccctttggagaccctgatttccaaaatgaagccacaaggagggtaggatgtgggctgctcagctgaggccacacagcacagtgggatatgaggaccccacatccctcttcaaagacccttggccatcaccacttgccaggggtgtgccaggtgtagagaatcgggggcaccgagcccactcagtgactgctgtttgatgggcagggagtgtgggctctggccggggaaactgtggcccaggttgcaaggaggaggctaagaggtgctgcatgctcggcatggtctgctccgaccctcccagcagcccagcaaaaggccctgtgtgcagaccgggaggcctgagtgcaaggccgtcaaatgccgtacttgaaaccagttggtcacccagggaggccaaagccccgggaggtgccaggcctgctttgtgccagggtgacattgcccaaaggcaaaccagagtcccccagcgcagggcggaatagggggtgctgaggtggtgcgacgctggccccagcctccaggcatctggtatctccagggcccaggcctgcgtcctgcctcggcctgaaggagcaggaggtggccccgtctgggctcccagccagaatctgcctctccccctggtaacagccacctccctcctctgcctggcctctgtccagccaccatacacggccccacgtggggcggctgcccagccccaccctctgaatcttccagggttatgtgacctcggccagaacccgccccctcgaggcctcagtttcctcatctggaaacaacagggttggtccctggggatgctgggacccaacccctcggaaatgtgctgaagtcacctgagccccacctggctgtgcacccacgggggaggttgcagcccctctgacccacaattcctcacctgcaaagtcggggtgatgcagttctgatgggaaccccctccccattctgcagattgatcccaggccactctcagggttgagtttcccaacccaccggccagagtgtcacccacctccacctcctccttgtccttttcctttttttttttttttttggcgttttcgttgcagctgggcctttctccagcttgaggcgccacctggcccatcactcagggaggccccgcaggccccggcttgcccctgctgtgtgccagggcgtccccgccgagggccagagcagcgtccaatggtggcagacagcgagctgctgaggcggggatgctgcacacaaaaggccctgtagtgctgggaagccagggctgggagggggctgggcccaggatgccgccggcacccgctaggaggggtttcagcttttccaaaaggggagcaataattttctttcttttctaaattttaatttggggaagaaataattttttagaagcaaaatgattaagaaaacgggtcatggtccttggaaggaagctgttctgacccaggccgggatatttttcttttctttcctttcaaccacttttttgtttgcatcaagaagggagaagcgggccgggcacagtggttcatgcctgtaatcccagcactttgggaggccaaggcgggtggatcacttgaggtcaggagttcaagaccagcctggccaacagggtaaaaccccatctctactaaaataatacaaaaattagccaggcatggtggcacccacctataattccagctacttaggaggctaagtcacgagaatcgcttgaacccgggagatggaggttgcagtgatccaagatcatgccactgcacaccagcctgggtgacagagcaagactccatctcaaaaaaacaacaacaacaacaacaacaaaaaacgaggaggccaaggcaagtggatcgttaggggccaggagtttgaggctgcagtgagctaggattgcgccactgcactccaacctgggtgacaaagcaagaacctgtctcaaaaaaaatgagaggcaatgtcattggcccatttttcatttgaaggaactgaggcccagagagggcaggtcctgtggccaagattgcacagcaggttgtggcagagcccaaacctgctatatgactttcagtggctgccgcaaaaattaccaccaactaggtggcttcaaacaatggaaatgttatttattaattaatgtatctttttgttttgttttgttttgttttgagatggagtttcgctcttgtcgcccaggctggagtgcaatggcgcaatcttggctcctgcaacctctgcctctcgggttcaagcgattctcctgcctcagcctcccgagtagctgggattacaggcacgtgccaccacgcctggctaatttttgtatttctagtagagacagggttttaccatgttggtcaggctggtctcaaactcctgaccacaagtgatatgctcacctcggcctcccaaagtgctgggattataggagtgagccactgcgcctggcctcctttttttttttttttttttaaattatttaagagatggggtctcactctgttgcccaggctggtcttgaactcctggactcaaaggatcctcctgccttggcctcccaaagtgttgagattacagacgtgagcctttgcaccccaccacaacagaaacttattctgtcatgtttctggaggctggaagtccaaaatcagggtcgtgccccctctgaagtttccttccttgcagcttctggtgcctccaggcattcattcctctcatgcatgggttgattattccagtctctgccttggctttctcttcttttttttgagacagagtctcactctgtcacccagactggagtgctatggcatgatctcagctcactgcaacctccgcctcctgggttcaagcaattcctgcctcagcctcctgagtagttgggattacaggtgcgcaccaccacacctggctcattttttttttgtatttttagtagagatggggtttcaccatgttggccaggctggtcttgaactcttaacctcaagtgacctgctggtctcagcctcccaaagtactaggattacaggcatgagccaccgcacccggcctgttgacttatttttgaaacggagtcttgctctgtcgcccaggctggagtgcagtggtgcaatcttggctcactgcaacctccgcctcccgggttcaagcgattctcctgcctcaacctcccgagtagctgggattacaggcacccaccaccacgcccagctaatttttctgattttagtagagacaggttcgccatgttggtcaggctggttcgaattcctggcctcaggtgatccacccacctcggtctcccaaagtgctgggattccaggcttgagccgccatcctggccggctttctcttgttacaaggacatcagccagtgggtttagtgtccaccctaatgccaggctggtctcatgtacagattcttgctttccttacacctgcaaagacctatttccaaataaggtcacaggtaccagggatgaggacttggacatatctttttggggactttattcagcgcactccacctagtctgtgaagttgtgtgaactcctcatattctaacccagaaaattgtgtcccatcaattctgccctttcccagcccctccacccaaggtcttgcagcctcctgcggatgggagtcaaggtgccaagcacttgcctgagctgggccctgcctcaaactgccccagctgaggttcagccagcaaagagaggggctgggctccttccaggaaccccaccaacatgcaacccccctgtttcccccaccaggcctcacactccccgacttgcccgagcagttctccccacctgatgtggctccccctcttctggtgaagcttgtggaggccattgaaaggacaggtaagttccagcctggctgcagcccctggattctgcttgcttacctctagtgacaggcgactcatcctctcacagggcctccaagctcatgctgcacggaaacaggctgagcctggatgccctgggcctctatgttgaatagggcacagagtgactcctaagggaagatgggaaggtgaacatgaccaggccactgcatgtgctgtgccctctcccagttctccctccccacccctcccatgcccttatctctgggcagcaaagggagactgcaggggggttgagcggccagtccaggcctcacgaggtcggggcagcatttgagagctgactcgcctgtccccttcacccccagggctggacagcgaatctcactaccgcccggagctgcccgcaccgcgtacaggtgaaggggagcctcaatggggttgggaggaggctgggggccccagtacacatgagttggacgtgtgcccccctgcacccgcagactggtccctgagcgacgtggatcagtgggacacggcagccctggctgacggcattaagagcttcctgctggcactgcccgcgccgctcgtgacccccgaggcctcggccgaggcgcgccgggccctgcggggtgagcctggcgggtagcccgggggaaggagggggctgtagcgggtgggagggcccaggcctggctcaccctgccctggccatctgtccgcagaggccgcggggcccgtggggccggcgctggagccaccgacgctgccgctgcaccgcgcgctcacgctgcgcttcctgctccagcacctgggccgcgtggccagccgcgccccggccctgggtcccgcggtccgggccctgggcgccacctttgggccgctgctgctgcgcgcgccgccgccgccgtcctcgccgccgccagggggcgctcccgacgggtgaggggcggggcggagccggagcgagcaggggtggagtttggggtggggcgggcggggcatggccagagtgagcggcgtctagaccctaagaagggaggggatggggtccagagtgagaagctgcgttcttgtgatgacggagcggagacctgggctcctgagtcgtgggacagaaggtgaaggggcctagtcccgaagcatgtgggtggtgcctgcaccttcccttctgctcgtcgcagctccggtactggtctctcgctcgcctttgtgtgagaatctatggagcacttactgcatacagctatgagggagctggcctcgcacatgtgcctgtatcatctcctcctccgccctgcacatactgtctcgtatatacccccaggcgtgcaagcgcacgcacaatcctgtgcacatgcgtgggcggacaggccctacccagccctcaccacactccccttccccctaaggagtgagcccagccctgacttcccggcgctgctggtggagaagctgcttcaggaacacttggaagagcaggaggttgcgcccccaggtgagtcccctgtattgctgtcatttcttcccgttgggggccgtaaatactgatccctgagtgctgccggcatcagcaggctggttgcagtgggaggcagccacagtatacagtcggtgctcaggatgcatttgttttcctgtcccccagcgctgccgcctaaaccccccaaggcaaagccggcctccacagtcctggccaatggagggagcccaccctccctgcaggatgctgagtggtactggggggacatttcaaggtaggttgctggcagggggccagggaccaaggaggtgtcacagggtgagcggggtctccaggtggctcggcagtcccaatgttggatgttcccacagggaggaggtgaacgagaaactccgggacactcccgatggcaccttcctagtccgagatgcttctagcaagatccagggcgagtacacgctgaccctcaggtgggggcctgtccctgcaaggataaccgggggtcacaggtcacagagaccgggagttcagaggggatagaacatgtgcggtttcaagaatggagggccaggcacggtggcttacacctgtaatcccagcactttgggaggctgaggctggcagaacacctgaggtcaggagtttaaaaccagcctggccaacatggtgaaaccccgtctctactaaaaaattaaaaaaaaaaattagccaggcatggtgatggatgcctgtaatcccaactactcgggaggctgaggcaggagaattgcttgaacccgggaggtggaggttgcagtgagccgaaatcgcaccactgcactgcagcctggacaacagagcagcaagactctgtctcaaaaaaaaaggggacagggattgagggtcaggtgcggggtcccactgggtgccgacacccctctcctcccccaggaaaggcgggaacaataagctgatcaaggtcttccaccgagatgggcactatggcttctcagagccactcaccttctgctccgttgtggacctcatcaatcactaccgccacgagtctctggcccagtacaatgccaagctggacacacggctcctctaccctgtgtccaaataccagcaggtccgtgctggcctgggagccagggagggtagcacctggctggccccaggcctcagtttcctaggtagacccgaccaggctatgcatctcccctcattccgccacgtatctccaggaccagattgtcaaggaggacagcgtggaggcagtgggcgcccagcttaaggtctatcaccagcagtaccaggacaagagccgcgagtatgaccagctttatgaagagtacacacggacctcccaggtactccaggccccgtacatgagggaaaccgagacatagaggggcagtggcaaggccgggagcaggatgaccaaccccagaggacttgaggatgaatatccagttgcaggtcacagagcaggcacttagcaccaagggctgttctaaaaacatagaaataaggccaggcacagtggctcccgtctgtgtacttgggaggcagagacaggaggatcacttgagcccaacagttcaagatccttctaggcaacatagggagacccgtctacaaaaaaatttaaaaattaactgggtgtcgtggtgcatgcttctactcccagctactcaggaggctgaggtgggaggatcccttgagcctgggagtttgaggctgcattgaattgtgatcatgctgctgcactccagcctgggtgacagggcacgaccttgtctctaaaaacagaaataagcgtacgaggctgggtggggtggctcacgcctgtaatcccagcactttgggaggccgagatgggtggatcacctgaggtcaggagttcgagaccaacttggccaacatgttgaaaccctgtctctactaaaaatacaaaaattagctgggcatggtggcggacgcctgtaatcccagctactcagaggctgaggcaggagaatcgcttgagcctgggaggcagagattgcaatgagccaagatcgtgctactacactccagcctgggtgacaagagtaaaactccatctaaaaaaataataataattaaaataaaaaaataagtgtacaagcttttacaaaaccaaaaaaggacagatgagaagggcccaaccagcctcacaggagtggctgagccaggacctggggagtgtccaggatgagcctatctccggctggccctcagttttcccatctgcagaatggaaccaggcaccttgattacttatgtccccttcaaccaagatgttattcaaaatgaaatcatgccaggtgcagggcgcgcacctctaatcccagctactcggaaggctgaggcgggaggatcgcttgagcccaggagttcaagactagcctgggtaacatagcaagactttgtctcttaaaaaaataaaataaaaattaagtgaaaggttttgtcactcaaggactgtgctaataagcttcttttgcaagttaagagggaatagattcaggtggaacagctgggaattcctcagtcgtccctagtaccctaagggttttctgtcctcttttttttgttttgtttttttttttttgagacagtgtcttgctctgtcatccaggctagagtgctgtggcatgatctcagctcactgcaacctccgcctccctggttcaagcgattctcctgcctcagcctcccaagtaactgggactacaggcacgtgccaccatgcctggctaatttttgtatttttagtagagatggggttttgctgtgttggccaggctggtctcgaactcctggcctcaagtgatctggctgcctcggcctcccaaagttaaaaaaaaaaaaagaaaaaaaaaatttaataaaattaaaaggtaggccgggcacagtgactcatgccagtaatcccagcactttgggaggccgaggcaggcagatcatctgaggtcaggagtttgagaccagcctggccaacatggtgaaaccccatctctaccaaaaagataaaaaaattagccgagccaggcacaatggctcaagcctgtaatcccagcactttgggaggctgaggcaggtggatcacgaggtaaggagttcaagaccagtctggccaacatggtgaatccctgtctctactaaaaatacaaaaaattaggcgtcatggcatgcacctgtaatcgcagctactcaagaggctgaggcaggagaatagcttgaacctgagaggtggaggttgcagtgagccgagatcacaccattgcactccatcctgggacagagtgagactccgtctcaaaaaaaaaaaaaaaaaaaaaattagccgggcatggtggctcacacctgtaataccagctacttggaaggctgaggcaggagaatcacttgaacccaagaggcagaggttgcagtgagccaagatcacgccactgctccagcctgggcgacaagagcaagactccatctcaaacaaaaaaaattttgaggtgctgtctcaccatgttgcccaggctggcctcagactcctcagggttcaagagatcctcccactttagcctccctactagctgggattacaggcattcgccaccacccctggcctctgtcccctttttactgatgtgttagctgaggctctaaatggacaagacagttgtccaggatcagttaggagcactgtaacctcagaattgactttggccctgagcctcagtttctctgttaatagttgttactttgttaggggttgttggaagggtccatgggacaaagtaaggaaagtcgtagtgcggcatctcccccaagaagccctgtgagctgtagcaactagatctgtcattcattcttagcagtgttaacaggtccaggtgtttgtggatacctataggaggatgtaaagaagaagagggtttggggggtggggttttgaaggctgaataggagttcatttggtgcagcaggcgttagaagaatgacactctgatagagggaccagcttgagcagtctccgtatcagagttgagatgtgcctttacccctcacgagggccttttggggagtcccaggaggtgctgagctgcgccccctcctccaggagctgcagatgaagcgtactgcaattgaggccttcaatgagactatcaagatctttgaagagcagggccagactcaagagaaatgcagcaaggaatacctggagcgcttccggcgtgagggcaacgagaaagagatgcaaaggtgagtctggcgcctctgccctgccccaccccaccctgatctggtgcagtacaagccagggagggaaggaagcagaaggaggccagccacttggaggcaaagagtagtctgttgaaatggactttgggcctggtgcgatggctcaggcctgtaatcccagcactttaggaggccgaggcgggtggatctcctgaggccaggagtttgaaaccagcctggccaacatggtgaaaccctgtctctattaaaaatacaaaaattagctaggcatgatggtgcgcacctgtagtcccagctacttgggaggctgaggcaggagaatcgcttgaacctggagttggaggttgcagtgagccgagattgcaccactgcactccagcttgggtgacagagaaagactgtctcaaaaaaaaaaaaaaaaaagaaatgggctttgaaggatgaataggagtttgctagaaagagaaatcagaggaaacagcatatgcacaggctcagaggctggaagcacatagtctggtgcaaagtaggtccttgagaaaaccctggaggccgggtgcagtggctcattcctgcaaccccaacactgtgggaggctgaggcaggaggattgcttgatcccaggagtttgagaccagcctgggcaacatggcaaaatctacctctacaaaaaatattaaaatgttagccagacatggtggtgcacacctgtggtcccagctactcgggaggctgaggtaggagggtcacctgagcccaggagtttgagggtgcagtgagccgagataaaaccctgaggtctctgcgccaccccacccctcccacaggatcctgctgaactccgagcggctcaagtcccgcattgccgagatccatgagagccgcacgaagctggagcagcagctgcgggcccaggcctcggacaacagagagatcgacaagcgcatgaacagcctcaagccggacctcatgcagctgcgcaagatccgagaccagtacctcgtgtaagtggcggctccatacttccctgcggctccctggcgactgctgcggcacatggagatctctctaggagtctcagtctctctctctccaccaagtggcccttcctgggccccgagaccccttaaactcggttcctcccgggccccttgaaagttttcccataggtcagcctcagcttagtcagaggtgtgtgcaatgggagtgtcactcctatcccattccattttgtggaaagttggaagccttccacaaaaattcctgctgggctgggcgcaatggctcacacctgtaatcccagcactttgggaggctgaggcgggcagatggatcacttgaggccaggagttcaagaccagcctggccaacatggtgaaaccccgtctctactaaaaataaaaaatacaaaacccggccaggcatggtggtgggcgcctgtaatcccagttactcaagaggctgaggcaggagaatcacttgaacggggaggtggagtttgcagtgagcagagattatgccaatgcagttcagcctgggcaacagagcaacactctgcctcagaaaagaaaagaaaaaaaaaatcgcctgctgtgcaacctaccatgctgggtggctgcggcagccctgtcctgggttcaaatcagttcaaatcctgcccccacccaccaacctcctgaagacctcagccagagcctccacctccctcttgggcctcagggagggcactgtcgcgtgccaggtgctgtgctaagcaccgtgctcgttatgagttcatttggtccttttcaagccctttgtaaagtttgccctttacagctggggagactgaggcacagaaccgacagctgccctgtgcaaaggccagcagtgctggagtgagcctctggtgatgatgaggggcctgggctggcatcttcttgggggactccataggcgttaacagaaacaaaaaaatgaggggtgtgggtcagggttccccagcagagctgggcgagccaccctgggttcaggctgccctgagccaggtcagctctgccctcttgtggcaaccggagatattgtacccagaaccctctctcctcagccagaccctgcctcccaccggacaggcccactgtgggctcagcacccacacaactgcacaagcccacctttcctgttccttctcaggtggctcacccagaaaggcgcccggcagaagaaaatcaacgagtggctggggattaaaaatgagactgaggagtgagtgaccgtctggagggaggcagggagggcttcccagaggagggggccatttggggtgggtttcgaagaatgagtaggagttcaccagggaggaaaagttgtccaggcagctggggagcctcggaggctggcaggtgagtgaccagggccctccccgccaccgccccccaccccagccagtacgcactcatggaggacgaggacgatctcccgcaccacgaggaacgcacttggtacgtgggcaagatcaaccgcacgcaggcagaggagatgctgagtggcaagcgggatggcaccttcctcatccgcgagagcagccagcggggctgctacgcctgctccgtggtgtgagtggaccgcagcggtggggattcccgcgtccctcccagagctctcattgaatgcctgccgcgtgccaggccttgggaaggagtccctggtggggtcatccgggacaggggagcacgcggccctggaacggggaaagcttggcggggaggccagccttccgactccccctctcgtctgcccccacagagtggacggcgacaccaagcactgcgtcatctaccgcacggccaccggcttcggcttcgcggagccctacaacctgtacgggtcgctgaaggagctggtgctgcactaccagcacgcctcgctggtgcagcacaacgacgcgctcaccgtcaccctggcgcacccagtgcgcgccccgggccccggcccgccgcctgccgcccgctgagcaccgaggacccgccccaagcagagccgcccctgggcccgtctgcgccggaggctgcggcggcgggagccacggaccagaccagccacatccaggggtcctcatttctccggctctggctcttgtttggggttctctcaccctctttctctttccttccctcccccattctccagatctccctctgtctccttttctctgtctttcttggcccctgtctctctccatgttgggggtcctaactcccccaccccatatctacgtgtcctccgggcattgccctctccatggctctggtcaccctgaccctctgccctgcccaccgcaggtcccccggggtcccggaagccccttctggctgcacctgccatgtttacagagggcccctgggctgcgcggccccagcctgggcaccctgatttttaagccatagacctggggtcagggcaggaaggaacttcactctgctgcttccgagaacctcggccgtgacattcggggccgggcgggacccgccccacagactccaacttcccctccaaaccccgaagtgaaacccgccaccgggttacccccacaagggggccgctgcgagaagttcacccacccccgaaaaaataattaaactcgcaggccaggcacggtggctcatgcctgtaatcccagcactttgggaggccaagacgggcggatcttttgaggtcgggagttggaggccagcctggccaaaatggcaaaaccccgcatctactaaaatacaaaaattagccgggcgtggtggcggccgcctgtaatcccagctacttgggaggctgaggcgtgagaatctcttgaacccaggagatggaggttgcagtgagcagagatcgtgccactgcactccagcctgggtaacagagggagactcctccgtctcaaaaaaataaataaataaacttgtgagctggccccaacccctcctaggaatcacagctccccgtactggtgccgccgcagtggccaagttgcgacactgcccacggcccctccctctgatgcagattcagggcttctcttcgatcatgttgggttttgattctgtttttccttgactgcaaaaccctctttcctctcctcttttgggacaagagccctggttttctacgctgcccttggccaccacactgcctgccccacgagctgggaggcaggttttgtacggtacgttgttattgatatgatataaaacatcaaacgtcgtgggtgattctgttgtcagtgactgggcttcagtaccacctctgcgtgtcggggaccctggtgtctacgggggtcacagcaggtcggacccgtgggtttaactccaagcccctctgagacccgacaacccctccctcccccagtttagctgctcaagcctggagaggttgaggcagtgcccaaggtcatacaggagagagattcgaatcctgagctcccgactgctcaggggaccccagaccccatccagcccctcaagtgcttccaagctgcttcccccgcccaccgcccccaaatttgaatcctgtcgcaaccatcagctgtgtccttgggaaagttgtatcccctccctgatccacagcttcctcattcattgccaagtggcgtcaaaagtcaaaaccctcccatgccacagggaggagtctcccgtgtctttgatgttctcaagtcgtcggcacctccagccagcattggaggctcttctctgacctctcctcacccactcccatgcacagcccgccgggtcccaggagacgctgagcaaaagccctgtggggttttttgtgtttctttttaaagagtcaaggtctctcactctgtcacccaggctggagtgcagttgtgcgaacacagctcgcggctcacagcctcaagctcctggttcccagcctcaagcagtcctctcatctcagcctttagagtcactggattacgggtgtgtgtcaccatgtccagctaattatttttaaatttttttagaaacaagatcttgccgagtgcagtggctcacacctgtaattccagcacttggggaagccaaggcaggcagatcacttgaggtcaggagtttgagaccagcctggccaacatggtaaaacctggtctccactaaaaatacaaaaaaaaattagccagacatggtggcgcatgcctgtaatcccagctacttgggaggctgagataggaagatcagatgaacctgggaggtcaacgctgcaccaagccaagatcgtgccactgttctccagcctgggtgacagagtgagactctgtctcaagaaaaaaaaaaaaaaaaagggtcttgcccttttccaggtgggtctcaaactcctggcctctagtgatcctcccacctcagcctccctgagtcgcgtaagccaccacgcgtggcctcatggcgtctttgacttggactcctgtttaccaccctccccatcacacccagaatccacacccccactgcgacgtcattgtcccttcagccctccccaaccctggggcctcactgtccttgtctgttttgtacagccacctctcaaggcccaacaaggctgaacctggggcaagtgcagaaagaaacctccactctgacccagtctactgctgggaccttgggacaggacctgcctcccttagcctcagagccccctagccttgccaggcactgtccctgccatgtgtcctgtctggagataacccataaataactccagcccagattgtgcctctcactgcataggtgctcacaggagaaaggttgccatctttatgatcccagctatgctgagctgggggtggaagagaatatcccgtgtggtctctaaaaacactcaaccactggctgtgtgtccttggcaaaatagccttccctctctgatcagccatttatttgttaccagctggagtcagtagcacctacccccagccccaactggatgcttctgagggttcaatgataaaatgggttgtaggcccactctatgcctggcaccaagccagagagcaatacattgtagggttacatttatgatttcttccaatagggctggtgcctggtaactactggaaaaattgtagcaattatatttatggttatttcttcaatcccacccggcatagggtaagcaccaaagttggggtggtgagtcttggggagcctttgccaacggtttggtcgtctgagggatgggctcggggaccatccagccactgggacttcagagaagctccggctcccaaaccagctactgtgtgtgtggccagggtcttccccacaactagaggggggcacagctggggactcaggtatatcttccagctgggtgtgggacattttcttccctaggatccgatgtgtcttgccctgaatgtaaggcctggcagggttggaatgtctcagttattcccccaacactccagcctccatctgggccttttttccaggctattctctctgccttcactgttggggccactgtcctgtgtaggcaccaaggcctgaccatgccatccagaagccccagcctgggacaactctcccccacctgcctctgagccctccatggtgactcttgttccccaaaccttatccttctccccattacacagaagggaaagctgaggctctgtcactcaaatccaaagccaggtggactccaagccaccccacccctatcccagacagcacaggctgcctctctcccccatgggcgtcccttgaaggccaggttgccccccaccccccacaagccttgaacgatgaaaagaaggaaggccagttctcttcaccccaagccagaagtggggctgggtgggtaccctagagaaatgacacgccactccctgcgccagcttctgctttccggcgtggctgtggtcaagcctgagtcagtcccacgggaccacggtgaggggtctggagcgtcggggtcaggagtttgaggggggaagggttgaggggcaggatgtgggggttgggtgtgagggaggtcacgggcgagactggagggaggagacctggccacacaggccttgcccactctcgggggcctgaatatttcagttactcccccaaaaccccggcctccatcccatccccagcctccatccgacgtcacccctgttaggtcacaggcccactctgagagtgggtctcgggcctcaagtcccctagccgcccctagaaggtctaggggtgcgtggagacaccaccattcctctcagcctgtgtctgtctcaaaggccccacctcacctcccctaaaggtagtcttgcgccagggctcacgtgcctgggcagggctgattgccaaggggcccaatggcctcgtgactggggacccagcacctggcaggggtgggggtgggacactcagaggaaggagtggaggagggagagacgctggcccgggacccgaggggcgtgggcatcgggaggcgggcccgggttaggggcgggaccgccgcctggttaaaggcgcttatttcccaggcagccgctgcagtcgccacacctttgcccctgctgcgatgaccctgtcgccacttctgctgttcctgccaccgctgctgctgctgctggacgtccccacggcggcggtgcaggcgtcccctctgcaagcgttagacttctttgggaatgggccaccagttaactacaaggtagggacggcgacagggcgggcaggctggagggaacaggcgccctgtcggggcacgcggctccttctttctccccagacttcacaggggaagaccagggccccgaggggacgctgtccctgccgggttcctggaaaaaccctgttcagttcccggcgctgcggccacactccctccgtgccgtttcgctttcgcatcccgcatctgagaggcgcagctgcctccacccgcctagtcccgcccaagggttcaatgagcgcctactgtgtacttttggggcaggagctggggtctccttttgtggcccagggcacaagttcagcagctggccaagggccgccggcatgcattcttgctgctacccttgatgcattcattccagccagggcagggctcgcgtgtctttgggacctattaggcagatgccctagaggctgagcgacttgctcaccgctccagcgacatgggccacccgccacccctcagctgaagccggaagtcagcacctattaggtgccgcctctattcagtcggacttggaaagggttcacgtggatcccttgctcagctcagaggcaaggtctccaggtgaagtgacaagaaatgagcatgggccaaggccggaggcggtggctcatgcctgtaatcccaacactttggaagtctgaggcaggcagatcacgaggtcaggagttcgagaccattctggcctacatggagaaaccctgtctctactaaaaatacaaaaattagctgggtgtggtggcatgtgcctataatcccagctactcaggaggctgaggcaggacaattgcttgaaccagggagtcgggtgttgcagtgagccgagatcgtgccgcagcacaccagcctagcgacagtgagactccatctcaaaaaaaaaaaaaaaagtctcaaagtcaagattccacctggcaagttctggaaggcgtgcaagatgaattgcgtatcacagccccctttctacaagactaccaagtggggttgagagaagtggggaactgcccagggctacacctgcctcccacgccttcctaatccacagacaggcaatctatacctgcgggggcccctgaagaagtccaatgcaccgcttgtcaatgtgaccctctactatgaagcactgtgcggtggctgccgagccttcctgatccgggagctcttcccaacatggctgttggtcatggagatcctcaatgtcacgctggtgccctacggaaacgcacaggtgtgtgggcgctggggaaactgaggcacgtgggcaggggagcaggggacccagcctaccagcaggctctcaccctgctgccttgcaggaacaaaatgtcagtggcaggtgggagttcaagtgccagcatggagaagaggagtgcaaattcaacaaggtggaggtgagcggccccagggccccacactggggtgggggaaaactgtcccacgtacaggaggcaaatacgaggatgccagctctgtcttctgcctcgtgtgctcccatttaatcacatctttattccctatctcctgggtgggtactggtgattattacgagagggtgtcagggtaccctaggccctcttcatgccctctcctgccccctctccaaaccccaggcctgcgtgttggatgaacttgacatggagctagccttcctgaccattgtctgcatggaagagtttgaggacatggagagaagtctgccactagtgagtgacgcccctcactccacccaaggagggggacatgggtggtaaccttccctgcatccaggcagacccaaattcaagtcctagccctgaccactgctgtctgtgcagcccaggaaaacaactacccttctttattttatttatttttttattttttcttgagacagagtctcgctctgtcgcccaggctggaatgcagtggcgcaatcccagctcactgcaacctccacctccagggttcaagtgattctccagcctcagcctcctgagtagctgggattacagttgtgtgccaccatgcccagctaatttttgtgtttttagtagagacagggtttcaccatgttggtcaggcttgtcttgaactcctgaccttgtgatccgcctgccttggcctcccaaagtgctgggattacaggcgtgagccaccgcacccagccctttttttttttttttttttttttttttttttgagacagggttttgctctgtcgcccaggctggagtgcagtggtgcaatcttggctgactgcaaccactgtctcctcagtttaagtgatcctcctgcctcagcttccccagtagctgggactacaggtgtgcaccaccatgcccggctaatttttgtatttttagtagagacagtgttcaccatgttggccaggctggtctcaaactcctgacctcaagttatccgcctgtcccagcctcccaaaggattacaggtgtaagccaccacgcccggccccagcctcccctcttgaagcctccatctctgaatcaggggaatgaatgcaggtctcttaggagcatgagtgatcacagaggacttactggaggaggcatttctgagctgggcatggaaggatgagcaggaatgtgcagagacacagatgatgggatgtggagatgataggacagaccccacctacttccccgggggattgtgaagaatgactcccagagaagtgactcattggctccaatcatttattcattcatcaaacatccgggtcacccaagaggcctcacctagtgacaccctagtcctgcagggttagatcagggctgagagagtggcaaggagagggcactgaggagacactgtggaaggaggatgaagggtgttcctggcagagggatcagcctgtgtggaggtcctgagtaaagtgagatactatgggggtcagaggcagtgggtctggtcttagggatgaaaccaagggagctaggaggcaggagcagcccaagccctgccttaggggcctccactcaagcatgtattgagcacctgctgtttgtgggctttgtcgcatcactgtgaagccaactgtaccctcttctcagtgacgaaacaggcttggctcagggctggtgggcgggaccgttgagataacggggaggaagctgaggcaaccccctgctccccacccacccagtgcctgcagctctacgccccagggctgtcgccagacactatcatggagtgtgcaatgggggaccgcggcatgcagctcatgcacgccaacgcccagcggacagatgctctccagccaccacacgagtatgtgccctgggtcaccgtcaatggggtaagaatctttttagccctcagcttgacactcatagtcccatggagtcagggatggacaagacagagggaccagagataaaggaacccaggcggaggttgcagtgagctgagatcatgccactgcactccagcctgggcaacaagagcaaaacttgatagctttgcatagggaaagagggcattgatgctggggttttgaaaggtgagtaggagtccatcaggcaaaaaaagtatgtattaattcgaagtattaaacatccctagccacccccattgggaaagatgtgccactgatttgcgaggcgggaggcgggggccagacttgggaatatgtgcagccctttctgggctggaaccagggtgcatgggttggggtagctgctgggaatatgcgacccctgtcttgctttgtgcagaaacccttggaagatcagacccagctccttacccttgtctgccagttgtaccaggtaagctgggaggggagcagtgggattcaggtggtgggggtagggtctccttccaggaccccaactcatggccttcacctccagggcaagaagccggatgtctgcccttcctcaaccagctccctcaggagtgtttgcttcaagtgatggccggtgagctgcggagagctcatggaaggcgagtgggaacccggctgcctgcctttttttctgatccagaccctcggcacctgctacttaccaactggaaaattttatgcatcccatgaagcccagatacacaaaattccaccccatgatcaagaatcctgctccactaagaatggtgctaaagtaaaactagtttaataagcccttctggatggtgtaattaatttgataagtcagccattcccccttccccaggcctggcaaaacccgctctctactaaaaatacaaaaattagccaggcgcggtggcgggcgcctgtaatcccagctacttgggaggctgaggcaggagaattgcttgaacccggcaggcagaggttgcagtgagccgaaatcgcgccactgtgctccagcctgggcgacaagagcaaaattccatctcaaaattttaaaaaagtgactggttgtggccgggtgaggtggctcacgtctataattcctgcactttgggaggtcaaggtaggaggattgcttgaggacaggagtttgacaccagctttggcatgaaagcaagaccctgtctttacaaaacatgaaaataaaaagaattagcaggacatggcagcgagcaactgtggtactcgggaggctgaggcaggaggatcacttgagcacaggaggtcaaggctgcagtgagccataattacaccactgcactgcagcctgggccagagagcaagactctgcctctttttttttttttttttttttttttttttgagacggagtttcgctcttgttgcccaggctgaagggaaacgcgtgatctcggttcaccacaacctctgcctcttcagttcaagcgattctcctgcctcagcctcctgagtagctgggattacagacacatgccaccacgcccagctaattttgtgtttttagtagagacagggttcttccatgttggtcaggctagtctcgaactcctgacctcatgatccatctgtctcggcctcccaaagtgctgggattacaggcgaaagccaccacacccagccaagactctgccttttaaaagaaaaagaagggaaagaacatgttcagtgttgtattttttcctactgatggactggtcaaatcatagatgtatatattcttccttcgaggaagtgaggcttaattccactccctacaaatatctttgtttctctttattttgagatggagtctagctgtgttgcccaggctggtctcaaactcgtgggctcaagcgatccttcttgaggatcctgaagtgctgcgattatagacgtgagccagcgtgccgggccctacaaccaccttgacagtgaactagattgagtaacttgattccaaagagtagaacaggaaaagtgaaaaagaataccccggctgtgcgcggtggctcaaacctgtaatcacagcactttgggaggctgaggtgggtggatcacttgaggtcaggagttcaagaccagcctggccaacatggcgaaaccctgtctctactaaaaatacaaaaattaggctggatgcggtgtctcacacctgtaatcccagcactttgggaggcccaggcaggcagatcacctaaggtcagaagtttgagaccagcctggcaaacatggcaaaaccctgtctctactaaaaaatacaaaagttggtcaggcgcggtggctcacgcctgtaatctcagcactttgggaggccgaggcgggtggatcacaaggtcaggagatcaagtccatcctggctaacacggtgaaaccccgtctctactaaaaatacaaaaaactagctgggcgtggtggcaggcacctgtagtcccagctactcgggaggctgaggcaggaaaatggcgtgaacctgggaggcggagcttgcagtgagccaagatcatgccactgtactccagcctgggcgacagagcaagactctgtctcaaaaaaaaaaatttaaaaaatacaaaagttagccatgcgtggtggtgcacgcctgtaatcccagctactccagaggctgagatgggagaatggcttgaacccgggaggcaggggttgcagtgagccgagatcacgccactgctctccagcctgggcaacagagagagaccccatctcaaaataaataaataaataaatacaaatcatcaagtagcaaaggtggcatgttttgaggtggcacgtcctgaacttcctcattccctggctgaattggtggtggagagaaattcagggtagaagttctgaagtaacacatctacagaaggggtagaaaaagacagattagaacaaatagaaaggaataaatataagcacactatgccagatattgtcgaatcagtatctttgtcctgagaataggttagcttggttacacacttgtatctcattttattttatttatttatttattttttgagacggagtttcgctcttgttacccgggctggagtgcaatggcatgatcgtggtcttggctcaccacaacctccacctctggagttcgagcgattctcttgcctcagcctcccaagtagctggaattacaggcatgcgccaccacacccagctaattttgtatttttttttttttttttgagacggagttttgctcttgttgaccaggctggagtgcaatggcatgatctcggctcactgcaacctccgcctcccaggttcaagcaattctcctgcctcagcctcccgagtagctgggattacaggcatgcaccatcatgcccggctaatttgttgtatttttagtagagacggggtttctccaagtcgaggctggtctcgaactcctgacctcaggtgatccgcccgcctcggcctcccaaagtgctgggattacaggcgtgagccaccgcgcccagcaattttgtatttttagtagagacggggtttcaccatgttggccaggatcgtctccaactcccgacctcaagtgatctgcctacctcggcctcccaaagtgctgggattacaagtatgagccactgcacccagccttgtgtctcattttagaaggtggtggcttaggagggagttgggaacctatctaagttaggtctctaaatggtgtgagcaatcaggcatttaatgagcatttcttctttctctctctctctgtctccccaccctcactttccttccttccctttttttttttttttttttttttttttgagacagagtctcgctttgtcacccatgccggaaagcagtggtgcaatctcagctcactgcagcctccaccttctgggctcaaccagagtagctgggactaaaggcatatgccaccatgcctggctaatttttttttttcccgtttgagacggagtctcactctgtcgcccagcctggagtgcagtggcacattctgagctcactgcaacctccacctcccaggttcaagagagtctcctgcctcagcctcccgagtagctgggactacaagcgggtgctaccacacctggctatttttttttttttagtagagatggggtttcatcgtgttagccaggatggtctcgatcccctgacctcatgatccacccgcctcagcctcctaaagtgctgggattacaggcgcaagccaccgcgcccagccacacctgactaatttttgtattggtagtggagacggggtttcgccatgttgctcaaactggtctcaaagtcctggactcgagcgatctgtccgccttggcctcccaaagtgctgggattacaggcgtgagccactgcgcccagctcttcctttcctactctacaggatctggctctgttgcccaggctggagtgcagtggcacaatcatagctcactgcagccatgacctcctggactcaagcaatcctcctgcctcagcctcttaagtcgctgggactacaggctggagtgcagtggcgcgatcttggctcactgcaacctccacctcccaggttcaagtgattctcttgcctcagcctcccaagtagctgggattacaggcacatgccaccacacccaagtgatttttatatttttagtagagacagggtttcaccatttggaccaggctggtcttgaactcctgacctcgtgatccacccgcctcagcctctcaaagtgctgggattacaggcatgagccactgcgccccaccccgaagttcacatttacaaacagattttgaaaacaatatttaagcaggcatactataaaacataattattgttgaaaagcttatttacaagctttcatctcactttcatttaacttacttgtgttcaacaattatgcttaattactcatgaacatttcataaaacattgaaaaaataatcatcatcttaagttacttttcttgttgacaaatcaagtatcaaaaatcaaagaagcaaagaacctaaaaaaataaatatatgggacgcagcaccatggctcacacctgtaatcccagcactttgggaggccacggtgggaggatcactggagaccaggagttcaagaccagcctggccaacacagtgagatcccatctctataaaaaatacaaaaattggccaggcgtggtggctcgtgcctgtaatcccagcactttgggaggctgaggcgggcagatcacctgaggtcgggagttcaagaccagcctgaccaacatggagaaaccccatctccattaaaaatacattagctgggtgtggtggtggtagctctaatcccagctactcgggaggctgaggcagcagaatcgcttgaacctgggaggcagaggttgcggttagccgaaatcacaccattgcacttgagcctgggcaacaagagcaaaactcaatctcaaaaaaaaaaaaaaatagccaggcctggtggctcacacctgtaatcctagctactcgggaggctgaggcatgagaatcacttgaacctgggaggctgcagtgagctgagatcatgccactgcactccagcctgggcgacagagcaagaccttatctcaaaaaataaccatccaaggaaccaaaaaaaattaaaaacccacatatgggtctctcctttactttttaaaattaattttattgtcaggcttgacatccattaagcaaatcacctttttttttttttttttcagacagggtctcactctgtcacccagactggagtgcagtgaggtgacatcacagctcactgcaacctctgcctccagggctcaagcgatcctcccaccccagcctcccgagtgtctggaactacaggcacaagccacaacactcagctaattttctatatttttagtagagacagcttttcactatgttacccaggctggtctcaaactcctggactcaagcaatccgcctgccttggcctcccagagtgctgggattgcaggcatgagccaccgtgcccaccctcaattcacttcgtaaaaatttttttatttattttttgagacagggtcttgttctgtcacccaggctggagtgcagtaatgtgatcacagctcactgcaacctccatttccagggctcaggcgatcctccctgctcagcctcccgaatagctgggacaacaggtgcgagccacgagccagcatgcgtggtaaatttttgtattttttttttttttttttgcagagatggggttttgccatgttgcccaggctgttcttgaactcctggcttcaaatgacctacctccatcagcctcccaaagtgctgggatggatgacagatctgagccaccacctggccaagcaattcacttttattgcatgtattgttcttaggtttattttatagttttacagtttacacttttataatcttcaacatctaaagataacataagcctgtttgactagtcttaatttacataagcaaatgtggttttctaaagtcaatgaaatagagctcctttacaagttaatctttaggaattccatcaagagggagaaagtgttacatacctataacatatatatatataaacataaataggtgcagtcagaaatcttatagctttcattttaaaattatagctgtgagacaggtgtgataatacaaaactcactagtttttaaaaaaatggtggagccgggcacagtggctcacgcctgtaatcctagcactttgagaggccgaggcaggcagatcatttgaggccagggagttcaagaccagcctgggcaacatggagaagccccatctctactaaaaatacaaaaattagccaggcgcagtgactcacgcccataatcccagtactttgggaggccgaagtgggctgatcacctcaggttgggagttcaagaccagcctgaccaacatggagaaaccctgtcgctaccaaaaatacaaaattggccaggtgtggtggcacatgcctgtagtcccagctactcgggaggctgaggcaggagaatcacttgaacccaggagacagaggttgcagtgagctgagatcgtgcctctgcactccagtctgggtgacagagccagactcaatctcaaaaaatataaataaataaataagtgagatccaatttgcatctgcagaggcagatgaaatgagttaagattacctactcagatcatgaaagctttgtgctaacatttgtaaagactgttaaaatttttcacttgccagttggtttccaaattgccctctgagaacacagttctgatccattgcaggggagccccaaattttgggcttagcccaggagggctcttggcttcttctaggaaagtatccaagggtgacctggtggtgttatacagcacctttttttttttccctgaaagagtcttgctctgttgcccagcctggaatgcagtgatgtgatcacagctcactgcagtctccaaatcctgggctctagaatcccctttgcctcaaacttctgagtagctgggactacaggcatgcaccacctatccgagctaattttttaaatttttgtggagatggggtcttgctatgttccccaggctggtctcaaactcctgagctcaagtgatcctcctgcttcagcctcccaaagtgctgggatcacaggtgtgagccataatcccagcctgataagaattcgtccttttcttttttttttttgagacggagtctggctctgttgcccaggctggagtgcagtggtactttctcggctcactgcaacctccatttcccgggttcaagcggttcttctgcctcagcctcccgattagctgggattacaggtgcctgccactacgcctggataatttttttgtatttttagtagagacggggtttcaccatgttggccaggctggtcttgaactcctgacctcaggtgatccacccacctcggcctcccaaagtgctgggattactggtgtgagtcaccgtgccagcctttttttttttttttttttttttctgagacaaagtctcactctgttgcccaggctggaattcagtggtgctatctcagctcactgaaaccccagcttcccaggtttcagtgattctcctgcctcagactcccgagtaactgggactacaggcacacaccaccacactcagctaattttgctattttttggtagagatggggtttcaccgtgttggccagactggtcttgatctcctgacctcaagtaatccacccacctcagcctctcaaaaagctgggattacaggcatgagccaccgcgtccggctgaattcttactttgcattggcttgtcaggtcccagcatttctcccctgcagaccccagagggagcagatattcccagccaattgtagcccatcctcatcaccagaaactagcagggctagagctttcctcctctctctggtgtctggctcagactgacagacagattaacaaaacaatagcacacaaagcttattcattgtagatgggagccctcacgagaaaaatggagaccgaaaaaagtaactagacctaagtgtttgttttgagacagggtcttgctgtgtcatccagactggagtgcagtagcgggatcacagctcactgaagccttgacctctcaggcccaagcaatcctcctgtctcagcctcccaagtagttgggactagagttgcacaccaccacacctggctaattttttaaaaattttggccgggcacggtagctcatgcctgtaatcccagtactttgtgaggcagaggctgggggatcacctgaggtcaggagttcaagaccagcctggccaacatgataaaacccgtctctagtaaaaatacaaaaattagccaggcgtggtggcgggcgcccataatcctagctacttgggaggctgaggcaggagaatcacttgaacctgggtggcggaggttgcagtgagctgagatcgcgccactgcactccagcctgggcaacagagtgagactccttctcaaaaataaagaaaaaataaaaagatagatcacagagcccttctgggctggctgcggtggttcgtgcctgtaatcctagaattttgggaggctgagatgggcagataactgaggtcaggggatcaagaccagccagaccaacatggcaaaaccccgtctctactagacatacaaaaattagccggccatggtggtacatgcctgtaatcccagatacttggaaggctgagataagagaatcacttgaacccgggaggtggaggttgcagtgagccaagatcatgccactgcactccagactgggcaacagagtgagactccctctcaaaaaaataaaaagaagagcccttcttgcatccactgtttgcaagtgtgtttaactcaaaattctcaatatcaatatgccaaagttgtatgctggtatgttatgggtgacatgtcctgaacactatcaacagaaacatacaaaaattactgccaggtatcaaaagctgctcttcctgggaagcaataaagtatcttttgtttttctgtttttgagacagagcctggctctgtcgcccaggctggagtgcaatgacaagatctcggctcactgcaacctttgcctcccgggttcaagtgattctcccgcctcagcctcccatgtagctgggattacaggcacccgccatcatgcctggctgatttttgtatttttagtagagacggggtttcactatgttggccaggctggtcttgaactcccgacatcaggtgatccgcctgcctcggcctcccaaagtgatggaattacagccatgacccaccgcacccagccccataaattctcttaattttattttttattttactttttgaggcagggtctcgctgtgtcatccaggccagagtgtagtgtcaccatctcagccagctgaagactcagcctctgggactcaagcgatcctcccacgtcagcctctcaagtagctgggactacaggtgtgcactaccgtacccggataattttgttatccggtcttaccatgttacctggtcttaccatgttgcccaggcatctgggcaactccaactcctgacctcaagcgatcctcctgcatccaggtcccaaatggtaggattacaggcataagccaccgagcccggccaagcaacaatttttttttttttttttgagacaaaatctcgctctgtcgcccaggctggagtgcaatggcatgatctcagctcactgcaaactccgcctcccaggttcaagcgattctcctgcctcagcctccaagtagctcagattacagacatgcaccaccacacctagctaatttttgtatttttagtagagatggggttttgccatgttggcctgactggccttgaactcctgacctcaagtgatccacccgccccagcctcccaaagtgctcggattacaggcatgagccaccgtgcctggccaataaattcttaatttatccaccattgtctctcagcaaccagtaatccatttgtagattaccaaatggtcagctcaatgtcaaacaaaactatgggagaccactgttttggactgagctcctgcactaggcaccaacagaccagatgaaaccagaatggagtcactcgtgctaaatgccacataatcaaactgaaactttgaggaagcagacatatcccaaacagatcagtttcttattttttttttttttaaatttgttttgtagagatgaggttctggccaagttgcccaggctggtcttgaactcctggcctcaagcgatcctcctgcctcagcctcccaaggtgctggtattataggcatggtccactgtgcccagctgtctttcctaaaaatagattttagtctacctgggccgggcacggtggctcatgcctgtaatcccagcactttgggaggccgaggtgggcggatcacaaggtcaggagatcgagaccatcctggctaacatggtgaaaccccctctctactaaaaatacaaaaaattagccaggcgtggtggctggtgcctgtggtcccagctactggggaggctgaggcaggagaatggcgtgagcccgggaggcggagcttgcagcgagccgagatcgcgccactgcactccagcctgggcgacagagcgagactctgtctcaaaaaaaaaagattttagtctacctgaattagcccgataaggaagtcccctctgctttaacacttaccaaaaaaagtaacctgaagttaatcaggtttttctttttctttctttctttctttctttttttttttttttttttttgagatagagtctagctctgtcgccaggctggagtgcaagtggcacgatcttggctcactgcaacctccacctccccgggttcacgccattctcctgcctcagcctctctgagtaactgggactacgggcgcccgccaccacacccgtctaattttttgtatttttagtagagacggggtttcactgtggtctcgatctcctgacctcatgatccgcccacctcggcctcccaaagtgctgggattacaggcgtgagccaccgcaccggccttattattattattattttttaagatattctgtagttatggattggaaaaatccatattgtcaaaatgtccatactacacaaagcaacctacagattcaatgcaatttccatcaaaatacaataccaatgacattcttcacacaaaacagaaagaacagttctaaaaaacagtcctaaatttatatgaaatcacaaaagaccttgaatagccaaaactatcctgagcaaacagaacaaaactggaggaatcccattacccaacattcaattatactatagatctacagtaacaaaaacagcatagtaccagcacaaaaatagacacatacataaatggaacagaatggagaacccagaaccaaatccatacatctacattgaattcttttttactattattatactttaagttctgggatccatgtgcagaacgtgcagaaggtgcaggtttgttacataggtatgtatacacgtgccatggtggtttgctgcacccatcaaccggtcatctacattaggtatttctcctaatgctggccgggtgcggtggctcacgcttgtaatcccagcactttgggaggccgaggcgggctgatcacgaggtcaggagatcgagaccaaggtgaaaccccgtctctactaaaaatacaaaaaattagacgggcgtggtggcgggcgcctgtagtcccagttactcggagaggctgaggcaggagaatggcgtgaacccgggaggcggagcttgcagccagccgagatcgcgccactgcactccagcctggatgacagagcgagactccgtctcaaaaaaaaaaaaaaaaaaaagaagttatttctcctaatgctatccctcccctatcccaccctctgacaggtcccggaatgtgatgttcccctccctgtgtccatgtgttctcattgttcaactcccactttctttttctttttttttttttttgagacagtctggctctgtcacccaggctggagtgcggtggcgcaatctcggctcactgcagcctctgcctccagggttcaagcgactcccctgcctcaccctccggagtagctggaatcacaggtgggggccaccacacccagtggtttgtttgtttgtttgtttgtttgtttgtttgttttttgagacggagtctcgccctgttgccaggccggagtgcagtggtgagatctcggctcactgcaacctccacctcccgggttcaagcgattctcctgcctcagcctcttgagtagctgggactacaggcgtgtgccaccgtgcccagctcatttttgtatttttagtagaaacggtgtttcaccgtgttgaccagattggtctcaatcacttggcctcatgattcggacgccttggcctccctaagtactgggattacaggcctgagccacctcgcccggcattgatcaggttttttttgtattgttctgtttatttgtcccactttacgaaactcactgttctcctattgcccagggggacatgtcattttatctattctcagtaactcatgcctgtaattccagcacttttggatgcaaaagtgggcggattgcttcagtacagttcaaggctagcctgggcaacatagtgagaccctgtctctactaaagaggaaaaaaaaacaaaacctttctttaaataaaagttttaaattgggggaaggaaggaagaaggctctatctcaaaaaaaaaatcagaaaaccatgaagggtgtcctctgactgggcaaatttttgttgtaaaaacccatattgtaggctgggcatggtggctcactcttgtaatcccagcactttgggaggccgaggcaggtggatttgagatcaggggttcaagaccagcctgagtaacatggtgaaaccccgtctctacaaaactacaaaaaatagctaggcatggcggcgggtgcctgtaatcccagctactcatgaggctgaggcaggagaatcgcttgaacctggaaggcaaatgttgctgtgagctgatattgtgccactgcactccagcctgggcaacagagtaagactccgtctcaaaaaaaaaaaaaagccatatttcagttttactttttacaggccaacaaatggcatgattgtgtttcaatgacgtttggcttattctatgacctgaaaattatatgaaatgcaaatttgtgtccataagtaaaactttattgaaacacaatcatgccatttgttgacaaaaagagtgaaactctgtaaaatatgggccgggcgcggtggctcacgcctgtaatcccagcactttgggaggccgaggcgggcggatcatgaggtcaggagatcgagaccatcctggctaacacggtgaaaccctgtctctactaaaaatataaaaaattagccgggtttggtggcgggaacctgtagtcccagctactcgccaggctgaggcgggaaaatggcgtgaacccgggaggtggagcttgcagtgagccaagatcgcgccactgcactctagcctgggccacagagcgagactctctcaaaaaaaaaaaagaaactccgtaaaatatttaaagaggttaattctgagccaaacgtgagtgaccacggccctaggcacagccttttttttttttttttttttttttttttgagacagtctcgctctgtggcccagactggagctatctcggttcactgcaacctccacctctcgggttcaagagattaccctgcctcagcctcccgagtggctgggattacaggcgcccaccaccacgcccctggctaatttctgtatttttaatagagatggggttttaccatgttggccaggctggttttgaattcctgacctcaggtgatccagctgcctccgcctcccaaactgtttgggattacaggcgtgagccactgcgcctggccaatccccaccttcttgactgaccatttaaaaaatgtaagaaacacctttagctcatcatgagcagcacaaaacaggcagggacaggatttggccctgaggcaggagaataggtctggaggcagggaacataaggccaaatcaaatggaaacaattcagctatgacaggaaatatcttctccatttaaagagggcatacatccagtaaatgactttgtaactttacttcatcctcttcatttacataggacgtacattaagtaaccagtgaaaacctctagagggcatttaaaccccagaaaattcttaaacaggtctcttgagtccgtatgctccactggctcccaccctgcggagtgtactttcgttttcaataaatctctgcttttgttaagcttcattctttccttgctttgtttgtgcactttgtccaattctttgttcaagatgccaagaacctgcacaccttcaacagttaacagcccacaggcagtagtttgcgactctagtagagaatgcatagggatttccattgaaaatcattttttaagccagttacggtggttcacgcctatcatcatcccagcaccttgggaggccaaggcgggtggatctcttgaggtcaggagttcgagaccagcctggctaacatggcaaaacccctgtctagaccaaaaatacaaaattagttgggcgtggtggcccgtgcctgtaatcccagctgtttgggaggctgcgacacgagaatcgcttgaacccgggagggagaggttgcggtgagccgagatcgcgccaccgcactccagcctgggtgacagagcgagactccatttcaaaaaaagaaaaaaaataattgttccctacgggaacggtataattaggatataattgtttctggccacagatcacatcccttctggttaagtccaggagaatctggaaatacgtagggcaaccaggccagaaggcgttgtaactgcctaagattgaccaaccctaacgcgggaggcgggacgacggtcactgatttgccagcgtgacgccggtctgcgactggccagtgccgtcctgggcgtgtcggtaggacggggctgcgacggtttcccataggctggcacagaaaggggcggggaaacaagagtgcaacgttaccaatcggcatgcgggacgtaacgcaattcttttttccgattggtccgtgaagctcgggaggtcgttgggggctcgaccttgggatagaacgcctgccttttattggtcaatactcttcgggccgggcaatgtggctccccgaggctgcctgcgattggtgaacgcgtcgcggctcggggcggacctgcggactgaagatccttatgcgattggccggggagccggaggggcgggcaatttgggatcgacagtgactcgcgactggtcggcgcggcgaaagcagagcggcgcgccggttccttggttcctgagggcgatggcgcggggtggctggcgccggctacgccgcctgttatccgcggggcagcttctattccagggccgcgcgctgctcgtcactaacacgctgggctgcggcgcgctcatggcggccggtgatggcgtgcgccagtcctgggagatccgcgcccggcccggccaggttttcgacccacggcgctccggtgaggacgccacgctgcttagtccttcaccccgggcgacctttgatcccgacacccgactgcgggccgtgacccctgacccgtggcctcagtcccccgcaggacccttgccctgaccgcgcctctccccgggtgtctgtctccccgcagctctgggtctccatcacctcccaacccccggaggtctctgcccactacccaggagcctctggagccgcgcctcctggtggggcttgtagtggaagaatgcacgggtgggctcttccggttttcccggtgaggctgaggctccgggatggcattgggcttacccaggccttagccagggagggagagagggaatggactgaggaacttgccggcccgacccagccccctgacttacactcttatagcgagcatgtttgcggtgggctgcagcatgggtcccttcctgcactactggtacttgtcgctggaccgcctattccctgcgtctggcctccgaggcttcccaaatgtcctcaagaaggtcctcgtggatcagctggtagcctctccattgctgggcgtctggtacttcttgggtaaggagcctcctaagcctaggctttgcctctcataggtcgggaggggtggagccagctttgtgttaagaaggatgcagaggtgcatttccaatttgccccctgtttgggtcgccctggactaggagccaggtcacagcggggacaggacggactcggccgatgtgaacgctggcgagtgtaggagggacgaggactgtatctgttggggctgccctgggcgggaggttgagagcatttcccaaagaaggggaccacactcagttgagacatgaagagggaaccagcgggcagagggaacagctaatgcaaaggctctgaggcctgaaggaagagaaattgaggctagacttaatggggtgcaaccgtgccagccctaggctcggtaaagacagcggtattaatagaggagtctctcattctccacctcccagcccggcttcctggtctgtgatggaaaagtaacacaactccctcaacttcagggtgtctccattggggcacgtgtttatatgtttataacctctctttctctcactgggactgacttgctctgttttgtctctacaccagctaccctaattctctgtccatcccatctgaaagtccctgtccctctgcccggggtgggcggcgtgggctctcaggggcccaaccccgccccctccatcgtcagcccatcttgtcgtctcaacagtacttcctggcctctaacactctcatttcttggtttgcttcccaggccttggctgcctggagggtcagacagtgggtgagagctgccaggagctgcgggagaagttctgggaattctacaaggtgggagcacccgccccttgcacatgtccggccccgccccctgatggccgctccgcccccgcccagctctggccccgcccctcatcccccgcctctccccgcaggcagactggtgcgtgtggcctgctgcgcagttcgtgaacttcctcttcgtgcccccccaatttcgagtcacctacatcaacggcctgacgctgggctgggacacgtacctgtcctacttgaagtaccgggtgagtgtggagggcataccaggcacccaggggactccccagggggctacacgtgtgagctccaagtggcagtgtagccagccaccctggagggtgggagtctcctgtgctcctgacaacccacacccaacagtgggctggcggagagctcctcactagcagttaagacccagccgtggctgagcgccgtggctcatgcctgtaatcccagcactttgggaggccgaagcgggtggatcgcctgaaattggagttagagagcagactgggcaatatggtgaaaccccttctctactaaaaatacaaaaaattactggtacgcacctgtaattccagttacttgagaggctgaggcaggagaattgcttgaacccaggaggcagaggctgcagtgagccaagatcatgccactgcactccagcctaggtgacagagcgagactccgtttcaaaaaaaaaagacccatgccgggcgcggtggctcacgcctgtaatcccagcactttgggaggccgaggcaggcggatcacgaggtcaggagatcgagaccgtcctggctaacatggtgaaaccctgtctctactaaaaatacaaaaaaaaaattagccgggcgtggtggcgggcgcctgtagtctcagctactccggaagctgagaccggagaatggcctgaacccgggcagcgaagcttgcagtgagccgagatcgcgccactgcactccagcctgggcgacagttcgagactccgtctcaaacaaacaaaaagacccaacccttctctgctgtctgatgtgacctcagcccggtccctgccaagtctgttgagcagggctgacctctggcccaagggcaggtagagggacagggagggatgagccaggcttctgaccagatgccttgtcttgtgtggacagagcccagttcctctgacacccccaggctgtgtggccctggacacccgagcagactgaactgtctgcttcctggaccagatgcaagactgtctcctggcggaccaccccctctgacagaaggggaatgggctcctgcagcaagctcgggtcttgagccacgtcccagcaccacttcagctccggagcattgggctgagccgccctttccaagctcacttctgggactgagtttcctcaaccggaacacacccatgaagatggatgatcatcccctagcccttctcagcaggaacctcatgcgacctgtgaccaagatgtcccatcctcagcacagggcccactctgccaaccagtctcaagcaccagcccctcaacactgccatccacctggctctgggccaagccaccaatccagagctccctcaggtcctgggactaaggcggggacatgactgatcccctcagagcaggctcaggcctggagtcggcccccaaaagtttcacatagggccaggcagcctctgtgtttctttccctggtcctgaactgtggaaatgccattaaactctctctataatgtaactgaaactgctggctgggcgcagtggctcccacctgtaatctcagcccttcccgaggctgaggtggaaggattgctcgaggccaggtgttcgagaccagcctgggcaacatagcaagaccctgtctctatttatattgaaaaataaaaataacaaaagaaaatgctgtggatgatcaaaaccagggtgggcaggacccggtgctcacagggacacacatggatggtccattcgctttattgggtgcgtgtagtgttgtcatgacatctcctaaggaactggggggcacgtttgacactcatgaggtcagaacaggtctggtgggcggggggggggggggtcccagggtggtgaatacccacagcacacccccccaccaaaagagaaaacggggagaggagcctggcaggccagactctgatccccatggtccacacagggaaacccccaacagcggcctcggcccaccgcggcagagccgaggggctggcaggcctggccacctcccattgcccgatcagcctgctttagggtgtcatctggcccctcttcacaactgacaactgtggatgggggtgaattttaaaaaaaggcggggggggggggttcaggagggtgagcggtgagttcacggggccacgagacaccacagctgagtggggaaagggctatatgtacaggaggggcagggcttggggcgggcaggggagcctgggcccctgggggacatcttcaataaataaataaatagctacaataataaataagggtgacgggctaagtcaggagcaggggtcttgtgcccgtggctggtaggggccgggtcaggcccgggtagttgggggaaggtggggaagacagggaagaggggaaagggagtgggatggctctcagcaggcgcagtcctggtgcggtggcacctgctggtcactgagctgtgggccctgcttggcgcctgtgaccgcagggtccgccgtgtccaacgactcggacatcttctcgcagatgacatccaccaggcgctcaaaggtctgcttgacgttaatgttgtccttggcgcttgcctcaaagaactcgaaccctgtggtcagagaaggcagggatgaggaccctggccacgccctatgccaactcccagagatgcttctctgaggaaagggaacacctggagattcccagtgccaagcaacttattgaaggtactgacaaatcccacagagaagaaacttattgaaggtactgacaaatcccacagagaagcaacatggaactgggtcagctttgcatttcctgctttttttttttttttttttttttgagacagggccttgctctgctgcccaggatggagtatggtggcgtgatcatagctcactgcagtctcgacctcctgggctcaagtgatcctccacccccacctctcaaattgctgggattataggtgtgagccagcgcacctggcctcctgcccttccttcctaaaattgtgtctcgttgtccttagggacctggcaagacatgccctgcagcgtccagcccagccccgtgcactggccctggaaggctctgacactcaaatccagctgtgacctccccctgctcacacaccctctgtgactccctattgccctccaaagagtcccagcctctcagcacatggttgaggccctctgtgatcggccacatttcctccagctgaccctcatgttccagtcttgtgaaattattaccaaaacacacaggacctttctcactgcaagcctttgcccaagctatttcctctgcctgaaagacccttcttcactacccaccactccaggaagcctggctcctctcatgtgctcctcccatccaggtccctccctctacctcaggggtccctcgaggcacccctagatgcctcttgagcccagcaacacccaacaaagcgttggacggtgagtgtcagaataaatccttaaactttctgcatggcaaactcctacacatccctcaggatccaactcaaatggctcctggatgaaggctagtttgcagaaagtgtgaattacctggctttagctgtaagaccttgggtgtgtgccctcccctctcttagtgtcctttttctagacttgtgggtctccagcccagctgggcactcaccaaggtggtcagctagctgccggccacgttctgatgacaccacccgctcatcctccatgtcacacttgtttcctaccagcagcacctgggcattgtcccatgagtaggtcttgatctgggtggacctataggaggcaccaatgggggcaggtcagggcttggaggatcccagctccaccctgacgggctgatgtggagcctgtgtccttgtccgaggaagaaagacccagaagcttgcccctccatcctccccaccatcctttcccccaatgtgccccgctttcaccccactccagcccccgactgacccattattgtttctgtgttttggggttttttttgagatagagtctgggtctgttgcccaggctggagtatctgcctgccttcgcttctcaaagtactggaattacaggcatgagccacccagcccagaaattttctttttttgagatagagtcttgctctgtcgcccaggctggagtgcagtggcgcgatctaggctcactgcaatctccgcctcccaggttgaagtgattctcctgcctcagcctcctaagtagctgggactataggcatgagccaccatgcctggtaattttttgtgcttttagtagagacagggtttcactatgttggccacgatggactcgaactcctgagctcaagatctacccacctcggcctcccaaggtgctgggattataggcatgagccactgtgcccaacccagaaatttttttttaaagttattacttctgagcagaaaattgaaatgtttacaatctctaacctatgccaactctccttttttttttgagacagagttttgctcttgttgcccaggctggagtgcaatggcaatcttggctcactgcaacctccacctcccgggttcgagcgattctcctgcctcaggctcccaagtagctgggattacaggtgtgcgccaccacgtctggctaatttttgcattcttagtagagatggggtttctccatcttggtcaggctggtctcgaactcccgacctcaggtgatccacctgcctcagcctcccaaagtgctgggattataggtgtgagccaccgtgcccggccatgccaactctccttatagtctctatattctccaccctacacttgcagatatttgtttctatatggttatagttttacttttccatctgaaatccttctctgacccctacgttttatttattattttttgaagaaagtttggctcagagacaatggccccagaatgagtgtggaaggccagaagcgatggctcacgcctgtaatcccagcactttgggaggccaaggtgggcagatcacttgagccaaggagttcaagaccagcctgggcaacatgaggaaaccccatctcaactaaaaatacaaaaaaattagccaggtgtggtggtatatgcctgtagtcccagctacttgggaggctgaggcaggaggatcacttgagcccaggaggtcgaggctgcagtgagccctgatcgtgccactgcactccagcctgggtgacagaataaaaccctctctcaaagaaaagaaaagaaaaaaaaagagcaagtggggtacactcaccagtcctgcactgcattgaaggattcctcgttggtgatgtcatacatgaggatgaagcccatagcgccccggtagtatgcggtggtgatggtccggtaccgctcttgccctgctgtgtcctagggaggaagagatgaaggtcagagaggacctgcacataaggccctcgaagaggaaatgagctctgatatcatccagttcagccccctgggagaagcaggagcttgcccaggggcacaaagtgtcaggaagagcaggttgggtcaccagtgctcagaatatatgagtgctccattattccacagagtcattcaccaaacgtactgtgccaggtgctgtggctcacacctgtaatcccagcactatgggaggctgaggtgggcaggtggcttgaacccaggagttccagaccagcctgagcaacatagcaagaccccatctctacaaaaagtacaaaaattaacagggtgtggtggctcacacctgtagtcccaactactcaggaggctcaggtgagagggttgcttgagcccaggaggcagaggttgcagtgaggtgagatcgcgccactgcagttcagcctgggtgacagagtgaaaccctgtctcaaaaaacaaacagggggtcgggtgtggtggtggctcacgcctgtaatcccagcactttgggaggccaaggcaggtggatcacctgaggtcaggagttcgagaccagcctggccaacatggtgaaactctgtctctactaaaaatacaaaaattagctcggcgtggtggcatgcacctgtaatcccagctactcaggaggctgaggcaggagaatcgcttgaactcaggagacagaggttgcagtgagccgagatcgcgccattgcactccaccctgggtgacaagagcgagactccgtctcaaaacaataacaacaaaaaaaaaaaaaaaaagaaagaaagaaagaaagaaagaaagaaaacagaggccaggcgtggtggctcatgcttgtaatcccagcaccttgggaggccaagacaggtggatcacttgtggtcaggagttcaagactagcctggccaacatggcgaaaccctatctctactaaaaatacaaaaaaaaattagctgggcttggtggtgagcccctgtaatcccagctactcaggaggctgaggcaggagaatcgcttgaacccgggaggcagaggtttcagtgagccaagattgcactactgcactccagcctgggtgacagagcaaaaactctgtctcaaaaaacaaacaaacaaataaacaaacatggactgggcactgatcttttccacaccctgaactggacactggggacacagttgttaacaagatgggcacttcccttgctaagtgacactcagtgtgggaaatagaaaataacggtataaatgtatcctatattggagagtgacaaggaccaaggagaaaaatcaagccagatgaagatggagagaatttaactgtaggtttaaaaattaaaggaagctgacacttgcctgtactcccagctacttgggaagctgaggcgggaggattgcttgagcccacgagttcaaatccagcctgggcaacagagtgagactctgtctcttaaaactaacaaggccaggtggggtggctcatgcctgtaatcttagcactttgagaggctgaggtgggaggatcgcttgagcccaggagttcaagaccagcctgggcagacatagcccgaccctgtctctacaaaaaagaaaaaaatcagcaggcgtggtggtagaagcccgtggtcctagctactcaggaggctcaggtggaagaatggtttgagcctgggaagtcgaggctgcagagagccgtgatcacgtaactgcattccagcctaggggacagagcaagaccaccctgtctcaaaaaacaaacaaaaaaagagaatggggaccaagatccagctgaaacctcatacatggaagaacttgaagatggggaaactgagggaccaggattaggtgcttatgggagaacacaggtgctgtttctgccccggtacacagtgggcaccttactgataaatgcccagtgtgtaagtgaatgactccagtcaggaaagagatagacgaggttggggctgcttttccaagtacgggaatccaaccgagccgggcgggagccctccagctgggacccacccagatctgcagcttgatcctcttgtcgttgcgatagatggtcttgaccttgaagtcgatgcccacggtgctgacgaaggcaggcgtgaacgagtcgtcagcatagcggaagaggaaggacgtcttgcccacgctgctgttgccgatgatgagaatcttgaacatgtagtcgaagttctgatccgaggactccttctgcccatagcgcgagtctgtggcggatgccatctggggataccgggtgtagcagagccgtgaggggggctctctccatcctcatgtgcccaagcccaggcagaagatggcaagggctccagaaaacggccggtgtatggaggacacccttatcccatcaggagccccagtattaattggtggtgcccccagcagagggcagcctgtgaccttgaaatcctgggcgtttcagaggaggggctcagagggttgccgatggggacaccccagcagcccccttcaaggggcaggtgccccaggtggggctgtaaccctaaacccagggctgagcccggagggggtgactgcggctggctccgccccccatcaatctttcatggtcctcagaacccggccgcgcggccccacgtgcaccgcgtgcatggtccctcgaggacgcgcatctgcagcccccgctccccgcaaacctccaggccggagagctccggccaaggccgctgcatcacatgatacaggaggggcatgcacacgctcacgtgcacacagcctcaaacacgctcatccgtacatacaggagtgtgtgaacgcactgaggtgcacaggacaaagacacagacacctgtttgcacaccgactcgcctatagaaatgtgcaaaccacccgtgcgcacaggcccctccacccatgcaggcgtgtgcacatcacccacacggacacggatccccgtgcttgtatgcacgggccatacctgcacaggcggtccacacgtctttctccacgcgcgtgcaacgctcacacacttaggcccagacccccacggcgtcacacgagcatatccaggtacacaagcaagggtgcacacagacccgctgacacaggcaggcgcgcacacgcgtgtgcacaccacgcgcacgcgcacgcaaaagcctcccgcgcgcacagcttcccgcaaggagctcggctcccctccccctccgccgcagagcaggggggttgggggggttagtggtgaggatcaggcaggagtggggcgcccgggccctacccattcccagcctcgcgaccgccgcatccttccccccattcaaccctagtcaacctcgtcccccacctccatcagcccatcagtcaaatgaaggttatgcaggtgctcggagcctgagcacacccggccgcccaggagctcaccttgccctgcaccgatgcaacggcgaccctagcggcggtgacttttttggcggtggcggtgacaggaccccggtgcgttgatgtggggctgcgcggcggcggcggcagcagcggctcaggcccctgcagtcctccgtgacgtcctgcaaagggaggggcggagcctcacatgtagataagtccgtgacgccatccggaggcggagccgcgcgtagagatgtggcccattgacgcacgcagagccagatggggcagggctcctgagcagattgacgtgcaaatggggcggggcctagcgtgtgcatccagtaggggcgggagcggcgcgggggccgactccgcctctcgtccgcctcctgtccgcctcggggaggcggggcccctcagcgttctctcactggcttaagctctcgagcgacgggcgaagtagccaatcagagattgtctacgccctcctcttgtccaatggtggcatctgggagattgaagggccgagaggctgaggccttggctgagccccggtcttcgaggggcggttcccttacccgcccgcacccaccccaggtaggggactcttgaggccaccgtctagtccaaggtgctgtgacccctgttaaatgcccctgactcccaattgcagaaaagaaaaatcgaggcccaagagatgttttataccctcacatatatggggttcaaaataaataccaaagaataaacaggagtcaagagggacccctgtcccattcccgaggcgtaagacccccccactgagggaggggctagtaaagactccacccctcccccgtttctgaggtttgaaaagaaagaagtagaggtcaagagagcctcccctccccaccattcccagaaaaggaggaaggggctgatggactctctgggaaccccctcccctccctgcgccccgtcatcaagaagaaaattcgaagaaaaggtttagcagggacagagaagcgacctgtcccggaaaccccttaaagcctgcggtaaatgccccgggaaacagggagggcacgagccgaagcctccagctcttcaaagctcggattcaaagacccgggggctgggagaccccctccctccatcctgggaaagcaaaactcagaggatggagccttttgggagctaagatggtccatcttttattcctccaaatctttagggaaggaagtcagaatttggggagggaggaggagcccgaaaccccagcccccactttgggtctcctgctccccctactccagctttcaaaccctccaggggtgtgtggcccccaggagagtcctgatcccctagattctccccccacccctcccagtaggcggggctggagcgtgtgtgtgtggcggggggtgactcgtcctgtttataaaaagctcgccagctgcggaggcgccgagagaccagaataacttagcgcctcgaggcccagccgccgccaacccagtccccagcccgcccccagtgccctgggagtactgggacgcccacccccacgtccccgcaccgtttacatttgggaaatttattttttctttttagggtaacatgtttgctccctcctcccccactcggactatagaagtatcaccaatccactgcagagaaattgggaaaattcagaaaaacaaaaaataaaaagaaatccacctcccattctccctgccctccgcgcccacgcggtagtccgtgctctgtggggggctccagggcagctggtccaggccctggcctgccgcctccttggaggggaggtttttcggttgctcagctccctgatcgcccaaaggcacgcttcctacatgggtggctctctcggaaatacctcctgccttttttccccaggaagagaaaagtgagccacgagaatgtgcggaagcttccgtcactgacttagtattttaaagtaaaaatagccgggtgcggaggcttacgcctgtaatcccaccactttgggagaccaaggcgggaggatcgcttgagcccaggaattggaaaccagcctgagtaacatagggaggccccatctctacaaaaaatttaaaaattagctggatgtggtgtcgcgtgcttgtggacccaaatactcccgaggctgaagtaggaggatcacttgagctcaggaggtcgaggctgtaggaaaccgtatcgcgccactacactccagcctggacgacagagtgagacgctgtctcaaaaaattaattacttaatttaaatttaaaaagaatgcaagcccttgattgtccagagcagcattgggctctggaattagaaatggttgagctgggggaggggctgcgggattggggtattttctttgtgtcaggggagacagagctggtgggagaacgggctaggcttccaggccggtcccactcagaggaaagtccagaggcttccctgcatccctaccctatcgtctacactagacaaataaaaataaaaatgtggccaggtgcggtggtttatgcctgtaataccagcactttgggaggccgagtcaggaggatcactccttgaccttgaggtcaggagttcgagaccagcctggccaacatggtgaaaccccatctctgctaaaaatacaaaaattagcccggtgtggtggtgcctgtcccaggaggctgctcaggaggcccaggcatgagaatcgcatgaaccagggaggcggaggttgcagtgagctgagatcaccggcaccactgcacgccagcctaggtgctagagggagactctgtctcaagaaaaaaaaaaaaaagtatcccagatacgggtccagggacgacttctcggggaagaagacactaacttaaaacccagtgtgggggccaggtgtggtggctcatgcctgtaatcccagcactttgggaggccgaggtgggtggatcacctgaggtcagaagttcaagaccagcgtggtcaacatggtgaaaccccatttctactaaatattagccgggcatggtggcggtcgcctgtaatccctgctacttgggaggctgaggcaggagaatcgcttgaacccgggaggcagaggttgcagtgagccaagatcacgccattgtcctccagcctgggcaacaagagcgaaactttgtctaaaacaaaaataaaaacaaaaatctaatgggtgaggctgggggctgagagagaagcattccaggtagtgggaacagcttgtttgaaggccctgtggtgggaccaggcttgcagtgtggccagagcagatgcagtcagtaagaggagagggacaaatgcctttggctcaaactgaaggagaacatatgaatattcatttataagaaatatgaatattctagggctgggtgcagtggctcatgcctgtaatcccagcactttgggaggccgaggcaggcggatcatgaggtcaggagttcaagaccagcctggccaacatggtgaaaacccagtctctactaaaaatacaaaaattagctgggcatggtggtgggcacctgtaatcccagctactcaggagactgaggcaggagaatcgtttgaacccaggaggcggaggttgcagttagccaagatcacaccattgcactcccgcctgggcgacaaggcgagacgcaaagaaagaaagaaagagaaagggaaaaggaaagaaaagaaagacagagaaagaaagaaaagaaaagaaagaaaaaaatatgaattttttttttttttttgagacagtctcgctctgtcacccaggctagagtgcagtggctcgatcttggctcactgcaagctccgcctcccgggttcaggccattctcctgcctcagcctcccgagtagctgggactacaggcgcctgcaaccacgcccggctaattttttgtatttttagtagagacggggtttcactgttagccaggacggtctcgatctcctgacctcgtgatccgcccgcctcggcctcccaaagtgctgggattacaggcgtgagccaccgcgcccagccaaaaatatgaatatcttataacagatggagaaaaactagagggaaataagtcaaaatactgcagataatccatgggtggagatacagcagaattttatttccttctttatacatttccattatttccaaattttttacagcgaacatggtattactttgtaagcggactggggggaaaaatcttgaaaaaaaaattccctaaatatcttctttttaaaagtctggaaggaaatgcaccaagttcgtgaacccggatgacttttagttctggcactgtggaattttatcattaactgtgatgatgatgaattctgagtggttataatatttatgaacgaagccagctgctctggaagccgagggcggctgtgatgacgcctgtatcttgtataaatattcaggcacgcgaagagggaggcagaggggagggatggatactgaggcttccggaggcggggatcgaaccctaggcttgagcatggtgctgcccagtccgctcggaggcccgaccagcaggacgagctcttcccggcgaggtgcggtaagtgggaccatcagggctggaggatgccacccctccgacccaccccccaacccccgacaagcgcgccccgccgtgtctcccacgcccgccaccagggggtgccgctggctaacattgggcgcccagatgcttgactttgagctggcaagaggacctctctgcgcctcagtttcctcatcagtgaaatggccaggacactcaatttggtcaatcgaatgtcttaagatgtaaagattttatttaaccccagataaatgctcagtaccccaaatgtctaagatatttcagggaggtcacagacaacaaccccccacacctcgtcggagtttatccaagtactaggatcaggttacagaggggaaactgaggcccagaagaggctatgatggcaagaaagcctcaggggcctccctccctctagggggagtctgaggcagtttcaggaatcaggagacttagagacctgctagagagggaaaattgtgtgtttttgttgctgtcctagggaaggaggaacacgtaggggacccagtatggagttctgcggacagagaaagcagggggctcctacatccagagacaccaaagacagaaaataaagcgacttaaagcaacaactggtgcataggttcaatcagtcttcagagacatgccgggcacagagccccctctttttattgttgttgtcgttgcccaggctggagtgcagtggcgcgacctcggctcaccacaacctccacctcccgggttcaagcgattctcctgcctcagcctctcaagtagctgggattacaggcacctgccaccatgcctggctaattttttttttttctttttgagacggagtcttgctctgtcacccaggctggagtgcaatggcacgatctcggctcactgcaagccccgcctcccggattcaagcgattctcctgcctcagcctcccgagtagctgggattcaggcacccaacaccatgcccagctaatttgtgtatttttagtagagatggggtttcaccgtgttggccaggctggtcttgaactcctgacctcgtgatccacccgcctcggcctcccaaagttctgggattacaggtgtgagccgccgcacccagcctctaattttttgtatttttagtagagacagggtttcactatgttggccaggctgattttgaactcctgatctcaggcgatccacccccactcagcctcccaaagtgctaggattacaggcgtgagccacctggcccggcttttttttttttcttttcttttttgagacagtgtcttgctctgtcgcccaggctggagtgcagtggcatgatgtcggctcactgcaacctccacctcctgaattcaagtgattctcctgcctcagcctccccagtagctgggattacaggcacccgccaccatgcccagccaatttttgtatttttagtagagatggggtttcaccatgttggccaggctggtctcgaactcctaacctcaggtgatccacctgcctcagcctcccaaagtgctgggattataggcatgggccactgtgctcggcctcagagccccgtctctttcctttccttctcttttctttttatttttagacaggatcttgctgtgttgcccaggctggagtgcagtgatgcagtcatagctctcttcagcctccaactcctgggctcaagcgatcccctttgtctcaaccttctgagtagctgggattctcaggtgcacaccaccatgcctggctaattttttttttcagagatggtgggggtcttgctatgttgcccaggctggtctcaaactcctgagcttaagcagtcctcccacctcagcctcccaaagtaccgggattacaggcataagccactatgccttgcccagcccttcttttctgctcctcttcctgccccctaccgtagtttcagaaacaaaactgggtatgagtgaagctttggtgctgaaaattttccccactcacatttccatgctcttgcagagagccgcttggtagaggaagacagggagatgcctttgggatggtctcctgactccccaccctttgtgcagggctactacagaggcagaaagctggcacgaagtagatgagcaataaatatttgataaagaaggaaataattaagtgacagatgtgactcaagagtgaccactggagagggtggactagaggctccagcagacagcacctctcctcacagggatagaagcccaggagaaagacaccagggcatcgtaagaggctgccccttagagagctcttttaggcaagtctagggtcagagtggaccccagccaggtgcctccaattagaccctgggagccacctataactaagagcttgattgtctccctaaatgggtgggaaagtgaagcaggagccacatggagcctcttcctggaaagtctgcctgccaagagccaaagggctttaccatccattgcccctgcagttcacgcagggctggccctaagtcctctggttgtcgaggggtaagtccccagggtctgggccggcttcaggggacaggagttcagtgtcaggcaactccaaggcctctttggctaaagctgtctcttccccctcctcttcttcctcctcatcctcttcctctgcctcctccagagtcagttcaaactggaatctgtcaggcccgtcccgctcggggttggtgaggtctgagggacttcgggggatcttgctctggtaccactctcgattgtcctccagcgtgtccagcaggtcctgtgcatctgggtggaccaggtcagcccaagtctcccacagtgggtgagcaatgtagtcaatgaaacccacctgtggcggggggtggggcatgtcggcatttggtgagttacagtgaaccctagactcaatccagcctccagatctttagccaagttgttccctctgcctggaatgccgcttcccaacaactgctcatccttcaaaacccttttcaaataactcattctctagaatgcctcccttaacccttctggcctcctccaaccccaaccctaaccccacagggctgaatgtacgtgtcccccagactggaagcccctccagggtcccgcatgtcacctagaacagatgtttccaaaccccagaagtgcatgtccctctccctgaagcccagagagaatggatcccaggtctaactcggcccagacagcacccttcaggcacactccctggctagccagccagggccaaaccagggctcgtggggttggctcagcccctccttttacttcctcccagtgtctaccggttcagcccagtcccctgccaacctgggacttctccactgaggccgtatgcttgtcacacatgggactgatgtccaggcccgactcacgctcgcggtctccctgctggaagaactcggccatgatgcggtccgtccactggcggtacaggggcagcggcttggtggggttgctcagatcagcacagtgcaccaggttctgcaagacctacagagatcgaggcttgggagggcactggcggggcccagccacacctagacctggcacctccacagacaggcttggtgccatggacacattcatcttacaggtggggaaactgaggcctgagacctgaagaaatggttaaggcacaggcatgtgactcttgccatttcttcaagtttggcatccagtcggcacttcataaatgaagctaaatgagaattgcaaaaatggaggccctctccgatttttttttttttaatgagttagggtctcacgctgtgaccctggctggagtgcagtggcaagatcttggctcactgcaacctctgcctcccaggctcaaatgatcctcccagcccagcctcccgagtaactggaactataggcatgcgccaccatgcctggctaatttttgtatttttgtagagacggggtgttgcccaggctggtctcaaactcctgagctcaagcgatccacccatctcagcctctcaaagtgctgggattacaggtgtgagccactgagcccagctttttttttttttttttaagagacagggtctcactcagttgcccaggctggagtgcaatggtgcaatcacagctcactgcagcctctaactcctggcctcaagcaatcctcacaccttggcctcccaaagtgctgggattacaggcatgagccactgcgcccagccttcactctaaatgtgtaagaaacctggctaaaattgtttttgtttgtttgttttggcttgtttttttgagatggagtcttgctttgtcacccaggctggagtgcagtggggtgatttcggctcactgcaacctctacctcccaggttcaagcaattctctgcctcagcctcccgagtagctgagattacaggcgcccgccaccacacccagctaatttttgtatttttagtagagatggggtttcaccatcttggccagactggtcttgaactcctgacctcatgatctgcctgcctcggcctcccaaagtgctgggattataggcgtgagccactgcgcccggctgctaaagttgtttttaaagtaaaaccggccgggcgcggtggctcacgcctgtaatcccagcactttgggaggccgaggtgggcggatctcaatctcatggagattgagaccatggtgaaaccccgtctctactaaaaatacaaaaaaaattagctgggcgcggtgccgggcacctgtaatcccagctactcgggaggctgaggcaggagaatggcgtgaacctgggaggcagagcttgcactgagccaagatggcgccactgcactccagcctgggcgacagagtgagactccgtctcaataaataaataaatacataaataaataaataaagtaaaaccaaaatttaaaaaggaagccccagtgcccatccagctacacacctggattcggtcggaatagttgtccaggaggaggacaccgaggcttgtcaccttcttggtctccaccatggtcttgaggtcggccaggaggttcatgtgtttggacatgtctgtggccagcacctgggggcaggcaagggaaggtgacaggcgcgaggaccctgcccaccccaaccctcactcccaactcccagatgccactctggctcagactcagccctctgggcctcagcatactcatctgtgaaatggaaggatgcaactgcattcactgcaaactctgctcaaaagaggggctcagtcaggggccccttttgggaggtcatctgggttggccatgaattccacatgtgtgacagggtgtagtggggaggtgatcaaatctgtgcgcctgggacttgtcagacagagtctcccacagtgggtgggcattgtagtcaatgaaacccacctgtggggtgggtggggcggaaggcattcgttgagtcacagcaaaccctagaaccaatccagcctccagatctttagccacgttgttccctctgcctggaatgccgcttcccaactcctactcatccttcaaagcccttttcaaataacccaccctcaggctgggcgccgtggctcacgcctgtaatcccagcactttgggaggccgaggcaggtggatcacgaggtcaggagatcgagaccatcctggctaacatggtgaaaccccgtctctactaaaaatacaaaaagttagcctggcatggtggtgggcaccggtagtcccagctactcggaaggctgaggcaggagaatggcatgaacccaagaggcggagcttgcagggagccgagatcctgcaacagatctgggcgacagagcaagactccgtctcaaaaaaaaaaaaaaaataacccatcctctaggatgcctctgttgacccttctggcctcctccaaccccaactgtgaccccacagggctggttaggggctagggtgacttgtgcctgaggacagtggggaggatgagttctgtgcaaaggggctggaagagttgggtacatgggagggaactaaaagaggtggctgtggctggaagaagtgagctcaagagaaagggaggtgagattgaagagactgagggcctctggcagctggggtagattgtccagaggctatgggagccacaggggagtttgcagctcactgtggggagggatgtgacttcatacccctcaaacttccatgtagccaccatgtgccctggagggctatttctaggcacagatgtttaaaaaccagattaacccagccgggcgccgtggctcacacctgtaatcccaacactttgggaggcagaggtgggtggattaccagaggtcagaagttcaagaccagcatggccaacatggtgaaaccccgtctccactaaaaatacaaaaaattagccgggtgtggtggcaggcacctgtaatcccagctactcagaggctgaggcaggagaatcacttgaacccaggaggtggaggttgcagtgagccaggatcacaccattgcactccagcctgagtgacagagcaagactccatttcaaaaaaaaaaaaaaaaaaaacttaacccacccatgtggactcagcccagccaggagtgactcagatgtggttcaccggcttctctgagagtcagacaaaagtctcaaaacttctcctcaaatctctcatctgtcccaaatgctgtctccccaccctgtgggtacccaccactcaagaccccaactccacctcaccaaacgtttagttctttctcactccaagccttggctttctctaagccctcctcacgtggggttccctctgctgagaacacagccttcctcattctgcacaccctggcttcaatgttccctctccaagaagccctttctgacctctttggctggtctgggctccgaaagcaccttgaaccttcctcctcacagctctgcctgcaggtccctagtcaagggttagaatttcataacggccggaactgtctttgcacagatcaagcacacaataggtgctcaataaatgcttgttaagtgaatgaatgaggcatgagaccccaaaacttactgatgtgcccctacctaaaaaaaaaaaaaattcaaatggatagatgtgtataatttttttttttgagacagagtcttgctctgttgccaggctggaatgcagtgtgcgatctccgctcactgcaatctccgcctcccgggttcaaatgattctcctgactcagcctcccgagtagctgagactacaggtgcatgccaccacacccagctaatttttgtatttttagtagagacagggtttcaccatgttggccaggatggtcttgatctcttgacctcatgatccgcctgcctcggcctcccaaactgttgggactacaggcctgagccaccgtgcctggctgcttaatttttttcttttcttttttttttttttttgagacagagtctcactctgttgctgaggctagagtgccgtggtgcaatctccgctcactgccacctccacctcccgggttcaagcgattctcctgcctcagcctcccaagtatctgggatcacaggtgcccgccaccaggcccggctaatttttgtatttttagtaaaaacaggggtttcaccatgttgatcaagctggtctcgaactcttgacctcaagtgatccacccgcctcagcctcccaaagtgctgggattacaggcgtgagccaccacgcctggcccagatgtgcttaatttaaggcttagcaaaagttgcacctgacaccccagaaacggtttccacattgcctgggtacagccaggatctgctgggcccagcagagggcctggggtttgggcagtcactagcccctttttttttttttttgagatggagtctcactctgttgctgagactggagtgcagtggtgcgatctcagctcactagctcactagctcactacagcctccgcctcctgggttctagcaattctcctgcctcagtctcccaagtagctgggatgacaggtgcacaccaccacacccagctaatttttgtatttttagtagagacgaggtttcaccatgttggtcaggctggtctcgaactcctgacctcaggtgattcgcccgcctctgcttcccaaagtgttaggattacaggcatgagccaccgcccctggccccactgttccatttcacagatgaggaagctcagacagagtgaggacatgcctgggtctggatgaaccgccggccatgccaatatcaccccaccctgctgtctgcagatgagaaggatgccccgctcccctctgcccctcccgccccgcttactgccctggcctcaccatgtcaatgaccatcctgcgcagactcagtcgctgcttggcgctgaggttctggaagatatcgcagttctctgcctgcagcagcttgaagcccacagccaggtgatggttctccagcaccgaggcgtcgttgtacataagcgccagctctgagtctgtgagggtatgggactgagagccccaagatccacccgccccacccactctacccaaaagcagcttttggaaatccttagcaaactcctacccatgcgttgaaggcccaactctagcatgccctcctgtaagaaaccatccaggtccctggcgcttccctgactgcagggctagggttgtctgtgtttggctctgcctacccaagactgggaaggctcctcatggaccccctatggccagtgacagtgagtactcagtaatgttttttttttttctttttcttttttagagacagggtcttgctgtcacccaggctggagtgcagtggtgcaatcacggttccctgcagcctcaacctcctggcctcaagtgatcctcccatctcagcctcctgagtagttgggattacaggtgtgtgccaccacccttgactaatttttgttatttttttgagagacagggtctcactgtattgcccaggctggtctcgaactcctggcttcaagcaatcctcccacttcggcctcccacaatgttgggattacaggtgtgagccatggcacccagtctctggactctaggtccttttgagtgaggggcctccactctcacccccagcactccagggcttgtacacaaaaggtgcccaataattgcctgtcaactgagtttttcagattcctcataggatcctaaactttaagatcttggtggaactgtctgggcgcggtggctcgtgcctgtaatcccagcactttgggaggctgaggcagacagatcgcttgaggccaggagtttgagaccagcctgggtaacagagcgaaaccctgtctctacgaaaaatacaaaaattagccaggcatggtagtgtgtgcctgtaatcccagctactcgggaggctgaggctagacaatcgcttgaacctgggaggtagaggttgcagtgagccgaaatcgcgccactgcactccagcctgggtgacagagcaagacactgtctttaaaaataaataaataaaggtcttggtggaaccagatcagctctgccacagctcattattctgtcatttgttggcacctactgtgtacccagacctgctccaagaccctgaagggagggaaaactgtcatagtcatttcatagacagggagactgggctcagggcagatgggaaccccctgagatcacctggtggacagggtggaggcagggtccacctcttctcctgcacccacttcccactcctacttactggtgttaatcagaaactggttggagaccccaggatggtccacgtcgtggatggcgcttgcaaagagggcagccaggatttccaagtctgtgaacacagcctgagcaggcagagggcacaggcggtgaggggcgggttctctgggccctgcacccgcccacctgcctgcagtcatggcgcagtacctcgagggcgggcgtagccagcagcacatgcgtggactgggccacgtcggcggcatgtaggctgttgtggtaggccacattggcgtggtagtgaccttccagcatcagcaggtaggtggccagtgtgtctgctgggatctggaatgtcttcagcaggtcccgctcctggtccatcacagaccctggctcagggccttggccttggggctgcagcacacgctgttcctacccctctcttctgaactcctatctatgcctcaagcacctgctcctctgagatgccctctgtgctctcctgaactcctccactctgtgttatttggtggtccatccctgaccctacaggactgggggtgtctctgtccagctcttctctccagatttctctcctcttcagggccaggggccgggccagggctgaggcttctggacaacaaactgttcatctgagtgaactcctattcatccttcaataccctgctcaaattatccccttcagaaatgtcagggaggatttgaaaaatgagtgtccctgaggtctgtggtaggaagcagtgagggaaaccccaggagtttttccttggaagccaagggcagggtaggtacctgaaaaatgctgaatatgatagctgtgaggggccggttcccacttagctccgccaccttgaacacatcaagtccccacttgttggtgtcttctagctcctaagatatgaagggctgaagcttaattaaccccagcccaacttccccagactctagagcctccatcctcccaccccaggttccacagtgagccccaactgcccagtatataggtgggcaaacaggcccgagatagggcatccagacagagccagggaccaaaccttgatcttggcattgtggttggggacccaccttggccagttgctcctcctggtcagtctggaccccaaagcgtgggacagtggctgaggagaggctggcactgtggcagagcccatgtaggccactgatccgggacatgggctgtggggcctcctcagcggtcaccttgggcagctccacctcggtctgctggtctgcggatgggccagggtgaagctcagagaagccgatttcacctgctggggcctggcctcaggacctgaattttgccaaaccccagaatcaacctatttccctttctacaggaaccaaagtaagttcggagtaaagaccctgtcggccggacgcagtggctcacgcctgtaatcccagtgctttgggaggtcgaggtgggcagatcacttgaggtcaggagttcgagaccagtctgagcaatacggtgaaaccccatcgctactaaaaatacaaaaattagtcacgtatggtggcaggcacctgtaaccccagctactcaggaggctgaggtgggagaattgcttgaacccaggaggcggaggttgcagtggctgagattgcaccactgcactcccgcctaggcaacaaagtgaaactctgtatcaaaaaaaaaaaaaagatcctgtcttgcctgtagctacctacccctctcctctgttcacagctgatctcagtaaacccttctgctaggcttggcccctgggtgcctggggctcagcattttcccccaaacagcctaatgtcctttccgtctcccaagctagtgtctggttccctccatctcctcctaggcaaatttctactcatgcttcaaaaccgtagctttaatgtcccctgctcctggaagttccccttgttcctccctctgatccagccctgactcatgggggctgaaggtgtctgtgtctggctgtatctcccccagactgaggtctatcataggaatctttcttttgtttcttagtactcctaaaatgtcgtccaggcagtgactcaacaaagctcacccaggaaggtccgggagatgtactcggacacctggttcccggagcggctggtttcggacaggtgggtcaactcccggttcaggatccgcttgaactggggcggagagaaggtgaagaccgtgatgatggggcaccgtgggccgaggcaggtgagctcagcgatctgccccacctcaccttgttggaggccatctcccccaccgagtgccgggtctgcagcgtctccaactgatccaggcaccagtccagctcgtctagcgtctccaatgccagcttctgccccgtgtcctctgggagccgaggcagtcaggggcctgcccaacccccccgctcagggaccccacgcctctcgcgacttcgtctcttcatctggaccctgaaactgttcccacgggggccacccaggactcctggacccaagttccagatctgttccccgagtgcctgtgtgaccatgagatctctgggcctcagcctcctcatctgtaatatgagtgtggtggggtccatccccgagggcgttattgtttttgcaggggcggggctacaattagccccagtataaggggctcatggactggggaggtcactatggaaaggaagctcccagctgtcctcagcgggggagggaaggaacaggtactttacctgcaggagggagctgattgctggatgaagggtttccgacgggtccctgcctgcggtacagcagcctcaggcgtggctgctccgcccatctcgccccgcccccaagtccaccaggccccgcccctcaaacccacctggaggcgccggagccccagcctcaatttgcagcccgctttccgcccaccttgtctctgccggccccgcccccgccccgccccgccctctacctacttggctgctcctaggcattgctggcgggcaagggccgccacgttgctccgaacggtccgcagactggccaggacctgttgggaggaggtggtaggcggtgggaaggagaggccggatccggagggggtcagggcagggagggcgggggacacccacctgggcaaagggcgtcacaatcatgtcctctccatgtctgcgaggagacgggccatcagggagagctctctcccatcttccagctttttacccacaccatatgccctcaactgagggggtcctgctctcaggacttctcctccaggctccttcttagtccctggggtcccctcatgcgactctccctgagacccagcacagcccctccaaccattcactcactttatcggcatctcataaatggggaaactgagtcctaggggtacgtagatatttcccttttcattatgcctactaggaagctcaaatcaaagtatttcttcatttgctgctaattggccttaatggtttgtttgtttgtttgtttgtttgtttgttttctgaggcagactcttgctctttcgcccaggctggagtgcagtggtgccatctcggctcactacaacctccgcctcctgggttcaagcgattctcgtgcctcagcctcctgagtagctgggactacaggcgcgcgccaccacacctggctaatttttgtattttttagtagtgacagggtttcaccatgttggccaggctggtcctgaacacctgacctcaggtgatccgcccacctcggcctcccaaagtgttgagattacaggcgtgagccaccgtgcccggccgaccttaatgtttttggattaccacccctactccagcaaaaggccaagttctctacacacttgattgaatatatgagctgtctggcaaactcctacttaaacttcaaaaccttccttaaatggctatttgaaggagcttgctgaatagaggaacaaaggaaggagggagggtagaggcggtgtcatcccaccagccccagactcacaggtcgctggccacagaggagttccgagacatggccttgggcgagagttcatagtcgctatctgagcggtacaggaaggactcgcgccgctggctgtgcgggactggagcctgcataatccggcccaggccagggctggactgagggtccagggccctcctcccacacgagagcccattttccaggtcaaagctgaaaggagagacggcatggtcagagacgagggtcatgacaactgggtgccgggtcgtggccaccttgtctggtgcgtcctccctggggctgcttggcagtcaggcaagtgtggtttccagcttgttcacctgcccccagctacaccctcaggaaccctgcacccctcacactttggtctttgagtctacactggactccaggacctcagttccagatcttcctcaaagtggctatgtggccatggacaggtactgactttctctggacctcaatcaccctatttcttttattttttttctctctttcttttttttttttctttctcgttctttctctctctctctctctctctctctctctcgccctttcttttctttttttttttttttttttgacagggccccactttgtcacccaggctgcagtgcagtggtgtgatcctacctcactgcagcctcaatctcctaagctcaagccatcctccagcctcagcctcctgagtagctgagactacaggagcatgccccaacactcggctaattttaaaattttttgtagagaccaggtctcactattttgcccaggctggtcttgaactcctggcctcaaacaatcctcccagctccgcctcccaaagtgctgggattacaggagtgagccaccgcacccggcctccccatttcttttttttctgttttttggggtttttttgagacgaaatattgctctgttgcctgcactggagtgcagttatccatgctggagtgcagtgggggaacgatctcggctcactgcaacctccacctcccgggttcaagcaattttctcgcctcagcctcccaagtagctgggattacaggtgcgcaccaccacgcccggctaattttttttttttttttttgagacagagtttcactcttgttgcccaagctggagtgcaatggcacaatctcagctcaccgcaacctccgcctcccaggttcaagcaattctcctgcctcagcctcccaaggagctgggattacaggcgtgtgccaccacgcccagctaattttgtatttttagtagagacggggtttctccatgttggtcaggctggtcttgaactcccgacctcaggtgatccgcccgccttggcctcccaaagtgctgggattacaggcgtgagccaccgtgcccggccaaagttttgtatttttactagagacagggtttcaccgtgttggccaggctgctcttgaactcctgacctcgtgatctgcccgcctcggcctaccaaagtactgggattacaggcatgagccaccgcacccggcctctcctgtttctaacatgtgcgtgatgtagcccatccccgagagctctttgagggggttacaaccgaacatccaaagactgcgactggatgaccatattgcaaagggacaaactgagatctagctcacatggtggacacgtggactggaaacagcttcttgggctcttctacctggaggaggccggggttctgcctagctcctgcgtgcgccttagtctagagagaccccactcctagccaacttgctcacacccttggctacctgccacgcccccagcgttccaggctccaccctcagcccataaggctccgccccacggccgccgaccacgcccccagctagccgggtcctgccctaggctcccccactcctccacttcatcttcagcctgaacgttccgcctgttatcttccacctccgggtctttgcacaggccgtgctttctgcccggcccaccctcctccctctccacactacctgtcccgttctaccctcaaaccctgtctttccctctggctcctcctctttggggtcagaggtcagagaaagggcgtagggcaagaactggggcgctagagaaggcggtgacctgggggtgggttttcaagaagggcaggcggaagcggcaccgacaggaagacaaccgggaccgcctgagactcggagctcccggccgagggccagtgtccggctggtcccggccaagacttttgggtcaaaggtcaccgtatccccgtccacgagctgggtcggcaccccgcgtaggctcagatctgggtagaggtgggggatttggcagcattcggtccaagtatgaccgggtctgagttgggtctgatcacgtcgaattggacttggtcacgaagagtttgttcgatgagttcgggagaattcggctacgtccgattgagctcgggagacttcggataagttcgagcttgttcgcctaagtccggttacgctcggtctgcttcgaacaagtccgggtgacgctcgggccgggtcgggcatgttcggtcacgtccggctacatgagggctagttcgggcatctccgactaagaccggccgcgctcggcctgttccgtccgactccagcgggtttagcagcaccgggatgaaccccacggccagccgaaggggcggggcttcttaacccttccctggcccgtctggggtgcgccgtgggcgctgtggtgcaatgggagacgctcttaggggcggactggaggcggcggataacccagatctgcccctcgagggggaggcatgcggatcgcgaccccctacccctctctcggctctccccaagggttccagaaaagcgcgtctgtggacaaatagggaaactgaggccaggagcggccacagggcgtgcaaatccggatcccgggcgcggagggttaaggactgggcccgggttttcttggggcgggggaggctgtttttctttctgctctaaacttagccgggagcggcggggtcaggctgtggttccatgacgcgggcggtgcgggggtagagccccccggctgtgggaacggcgcggctgcccattggccaggggggtaaactgagccagggaggctcggacttgggttcgggtctggcctgcgcggggccggccctcgttcatcctcacttctgagtacccgcgacgcgccctcgacgtccctgcgctgtctctagcgccttcaaaagggaatgtgcttcgctagtgtttggtgccccgaggtcgctctccaggacacggaacccccactctcccactccctggttgaaatggaaccaccaggaaccacggtcataccttctccctccaaccccagctatgaccttggagagggacctcccctctcagcctttgggtgccagacttaccaagtgggtgccaattcggcgcggaccaagcgcaggatgccagccacagtcggcgcccacaagccccactccgaaccccagccttgcccccatccctccccacgaggtcacagtcgtttctggaaaggcagggattcgaacccagaggggtggaccgagtgcttagaggatgcagcgcaagcagctgccgggcgcaggcgcgcgctcagcctgggactcccgaacgccctgcctcgaaaaccccctcaattcaggtcttcctccgtggacacccagagttcattgtgaggcccccagggcatctctttgctggcactgggacaggatgctggtgggagggggcaccaagggaaggagtgccccttccccctcctcccactgccaggacgcacagcctgcctgccccaggccggcgagggtcaggaggagacgtgagcctcagcccgtcccactctgggcctcacagctggaaggagacagacggctggtcccctgggcctatatccaggcggcgggtggagacagacggagacagagagagacagagtcaccaactgcgagacaaaagtagggtaaggtagggtagagggagagagatacagagaaagcgagggagaggcagagcgtccaagcccggactccggccccggccccagctgtccctggccttgtccctgtccctgcccttcccacctccacaccgggcgtcccggtgaccccgccaggccctctgtccagcctcaccacagcggatgggccaccgtgaagcgccgctgcaggcggatgctctgattcaccaaaagcttcctgaagagcccgggggagccgcgcggggatccccgaggggagccgggcccggggaccggggcgggcgcgggggggccctgcatcgccaggactgcgtggaggctggaccgagcgccggctgcgcgggaccttttctggacagctgcgggggcggggcccagcggggagggggcaaagggcgcatcggccccgcctcgaggccggcggctccctgacgacccccgggacaaacggggaaactgaggcacagagtcagacgcaactctctgctccttttttttttttttttttttgagacgatctcgctgtgttgcccaggctggagtgcagtggcacagtcctagctcattgcagcctcaacttcctgggctcaagggatcctcctacctcagcctcccaagtagctgggactacagatgcacaccaccacgcccgggctaatgtattttctggagagatgggggtgtctctttatgttgcccaggctgatctcgaactcccagactcaagtgatcctcctgcctcagcctcgcaaagtgctgggattataggtgtgagccattgcgccaggcccaactgtacttctttagagggctgcccctaagatctcagagcctggatcttactcagccttcctcggcacgtccctggttagtgcagcttgctgggccaataactgctaaaaagtgtagaatgagggagtcagaaagcaaggtgcccagagaaacagctgtcttgccttccattattgagggcatcaccgaggtatagagtttgccaatgtccgatcccacgcaatgtttctaatcctcctctgcccattttccagatggagaaactgaggcctagtgccatcaaacagcgcaccagaaactacaaacccttaatcctttgccaagtggggaaactgaggcttccatggacgcggtcacgggcatgggtctttgttgcagaaagcgagacccaaactcagggccccctctcccagcacccctccacgcaactccccacgtgatcccccacctgctctgacattccccaggccctgtctctggatgccttcacctctcctgctgtctcctcctagacaaacatccgcacatcacctctgccaagtcttctgtcctgcgaaacctcagccgcccacccctgccatcagagggacctcactgtcccaggactggggggggcctctggtgtctgggaggattcccagagtctgtaccaggtgctctaccctcagaatgctggagtcaggctggccttgttccactttacagaaaaggaaaccaaggcttagcatgtgtcacacaaggaggagggacctagaaacagccatgtcacaggcagaggcccaggggacctcccagcaactgaggcctgaccgtgccccttgctgtggaatgacctctgtctctcagcctgggccttccccccggggcggctgcctcagtcttggtgtccccagacatggtacccatgtttctggcagtcctggagaagcccattgatcagggatcccacaggagatcctgaggcaaccatgctaaggccagatacatgagagtctccccattctacagatgagaaaacagaggctcagaggaggagtcacacagcccagaaaaacagagagcctcaggtatctggccaggaagcccccctaacccccgcagtcttgcaaccagacacctggcgggaaccagacctcgctgtccccaagacaaaaataccatcgttgtctgctggggccagacctaattatagccatccctaggggacacatgctgctaggattggccttgtggggacactggagccaaggtctcagcagtcttgacaccacctccccgccactgtgagagaagtgacaatagttacatgtccccaaggagaaaccgaggcacagagattcagcccctcccccaaaatcacagacataaaataggaggctaagactaaacaaaattatgtaaactgagtgcttcaaaaacatgcagcactcagccaacagcagtgaagggaaaagtcattggattttcagacgaaacctacaaagtgtggactactattcccatttcgaggatggggctactgaggcacagaaaggcacagtcatttgcctaaggacacacagccataaggtgcaagactggggtcatttgaacccggacaggtagtgttcttcccagcctgggtcctcccgcactggatgcgttaactcatttcatcccctctgtagtcccaggggcgagtctcacattaatattttatcaataggtttactattaatgtttcatccatatatttaattttaaatattttattaacagttctaacaggaaggtgttaattaatagctgttcggatggagaaagagtcacagcaaggggtggccacagagccaggactcagcattcacagcctggctcctaccaggccctgggaggctctccaagccccgctgggtaagggacaaaagctgaaagaggtttggacagaagcacccctaccctgactccatccctgcattactgcatctcctgtagaggtgcccagtagtctctggtgcctttatttattttattttattttatttacatattattattattttttgagaacagagttttgctcctgttgcccaggctggagtgcaatggcacaatctcggctcactgaaacctccgcttcctgggttcaagcaattctcctgcctcagcctcccaagtagctgggattacaggcatgtgccaccatgccaagctaatttttttttttttttttttttgtatttagtagagacgaggtttcactatattggtcaggctggtctcgaactcctgacttcaggtgatcacctgcctcagcctcccaaagtgctgggattacaggcgtgagccactgtccctggccttacttttttgagacacagtttcactctgtcgcccagggtggagtgcagtggcgcaatcttggctcactgcaacctctgcctcctgggttcaagtgattctcctgcctcaacctcccaagtagctgggattacaggcatctgccaccacgcccaactaattttggtatttttagtagagacggggtttcaccatgttggccaggctggtcttgaactcctgacctcaggtgatccgtctgcctcagtctcccaaagtactgggattacaggtgtgagccactgcgcccattctgatgcctttagcacagcactgcctcagtttccctcatttgaatgttcccttctctgggcaggcacttttctccactgccaccaggtggccccagagagatttttttaaatgggtgtttttgaccattttacagatgagtaaactgagacgtggagaggggagatgacttgcccaagtccccacggaggagtcaagcagaatgagcagggtgggggccaggtcacatgtgtagatgttcgcatgggtcaaatcacacactcctttgctgcagaccctcccatggccccccattgccctcagatctgaattcacacctcccagaggtcccatgtggcccatccccacctcacttctcttggcttacactgttccagtctctccccactcctcactgttctctgaatcagccaggcttatttccaccccatggccctcacctgaatgcttgtcgcctgctgatgctttgtcttttgggttacagttagagtcacctcctccgagaagccctccctgactagccaggtaaatgcctcagagcaccctccagccatggatacaacttcacatttattgtcatgattatttgcctgtgagtccctggagagcaaggccaggtctgccatgttccctgctgttccctcagtacttggcacttagtagatgctcaataaatgcttgtagcggctgggtgtggtggctcatgcctgcaatcccagcactctgggaggccacggtatgtggatcacttgaggtcaagagtttgagaccagtctggccaacatggcaaaactgtctctactaaaaatacaaatattagccaggcatggtggtgggcacctgtaatcccagctactggggaggctgaggtaggggaatcgcttgaacccaggaggcagaggttgcagtgagacaagattgtgccactgcacccggcctgggcaacagagtgagagactccatctaaaaaataataaataaataaatgcttgtagcataaacagagagcctctccttccatcctcaagccacactgatccattttcagctcctcacatgcctgatcctcttgagtctgaggctttgcacattctgttccttctacttagaatacccttcttgcactcaccctagctgacctctttcctcctgcaggctaagcttaaatgtcacttctcccaagcagtcctccctgactcccaccccactgctgggtctggagcctcctctgggcttgttctctgacctttccctatcaacctgtgccttctccacctggtatgagtgtctccaccatcagccttaggggacacagcttcttatccatggttgcgtctccaacacagggcctgccacccagtaggtgcttaaatgccttctcaacaaaatgcttagaccctcccatacccctgtgatccatctggggctgtggggaagcacattcccccaacagtttctagggctgagtaaagagccacaagctggggacccagtgtgtaccaggctcaggcacagaatattcacctctctgatgaggacgccgaggctccgggaggcaccacggcttgctcaataccacacagcaggttggccttggggcctggccttgaactcagtttcgctgggcttccccctggggtgaacccctaccctcatatcagcacagagaagcacagtgggccacatgcatgctcatccacgtatgtgtgactgcagcgcatacgatgcgcagaacgacgtgtgtgtgcacacacacgtgcacagggacacccaatccaccgctcctgcctcccagagccaagcgggggcttcccctagaagagctcataccaaggctctgtttgttctttcttgaaaatggaaaatcatgagtcaccagaagggatggggaaggaggaactagaagccggggcgggagaaggggctcctgggtcacctgagaacagctccaacccctctgggctgtgggaaccatctaccccagatgcctcccaggctgctggagggccaggctgggggcgagaggccaggcttgctgatggagtcagaagccagtggcccctagggggtccatgcaccaggacgcaagaaagccaagctccagagcagggaagtaacccatccaaggccactcagcctggactgaaatctgggatgctggtccagctgacttggttctccctccaacctaaggagggcttggagttcctggaccctccttcctggccctggagcctccacctggtagttggagaccctcatgtagggccccctgaggattctacattatctttctatgagtctcttctgtctctgtcctaaccccaccccactcaacttacacgaaacaggagaagcagcccctccttacttaagtgaaagaaacttcctgtgcacgagcttcccaagggacttcccttcctcctacaggggagcagggtggggtgagggagtgggggcgggggaggtagcaagagaagactcctccccccaacactggaggcagcctgccctggcccttatatatctataatatattaaataggccaggtgctgtggctcacacatgtaatcctagtactttgagagactaaggcgggaggattacttgaggccaagagttcaagaccagcctgggtaacatggcaaaaccccgtctctagcaaaaatacaaaaattagccaggccttgtgatatgcccctgtagtcccagctactcgagactgaggtgggaggatcgcttgagcctgggaggcagaggatgcagtgagccatgatcgagacactgcacttgtacctgggcaacagaatgagactctgtctcaaaaataaaaacgtgtgtgtgtgtgtgtgtgtgtgtgtgtgtgtgtgcgtgtgtgtgtgtatttatatccaagcaccccagggttacctcgggtgcttgagctggtcacaaacttcccccacaggcctgcggacattccacaaccccgaaaaccttcggacccccagctatgttagcacaaggacagtcacactcagccacatacctacaggcaccacaaggggagacacacaggcacacccacaactacctgggacacatggaatcatacccaagcatgaacgtacaggagcaccccaaacacatctggtcaccccagtctcacgcgcgcgcgcgcacacacacacacactctttcagtcccaaccgcacgtgggcacacccggtcacacagacccacaagccatgatgacaccagcaccctcagctccacccctacgtagaaatagctttttccttccaggcgccagcctcaaccaagcagcagagacccccgccccctggagaagcaaggaccctcccccactcccgccaggccccgcgcgcccctcccccgcgctgcaggaggcccctgccccggccacctaccgcctgcaggaggaaacgggccaggagagccgcgacttcctgagctccggccgcgggctcaggtccctctcgcggcagcccgcggacttgtccggatccgaatagaagcgctgttggatgcggatggggcgccggggttgccgccacaggtgcttcggggctctggtcatgctgtggcggccgcgagagcgactcaacctgctgcaagcctctgccccttcgccgacccccaggttctccatgcgccagagaaaggggtctgggatagcagggagcaggactcgtccccgtgagcgggcgccgaggagcgtctgctcccgggtccggcccagggccgggagtggaggcgacagcgaggagctgtccgcgccggaggtgctgaagcggtagaaggtggaactggggctcaaggtggggccgacaccgaggagctgtcgatgcccagatggtgctgaagggtagaacaggggagaagaacgtggtgagggggtgttgaagctaggggctgaagagacccccccccaacacaccagccccgaaaaccgtctgccgtcccctatagcgctgcatggaaaagaaccaagacaaggacttggagtggagaagacagaaattgtccactgatcgctgctaaatggagggcagggagacagggtctcaggagacccccggggccgagacggtgtccctcgcaccgtgttgaaagagaaaaaggtagctttgggttctccgggtggatgagacagcgaagagctgtccgcgacctgatggtgctgaaggcaggggagggagaccggggttcaggtgcacccccagaccagggcgtcatccgcccaggaggtgctgaaacatgagcagtgacgggccctcaaccttccccagcaacaatggcaacaaggagtctggaagcagtcaaggttctggtcttcggaggtacgtacagatagcagtctttctgccaagcccaggaaggtaggctccgcggttcagccccagaaggggtctctttggagccctaaaacccccacccatgccaggcagggatatgagaaggacagggaaattggcaaggctgtgagggggctcccatgtctgggatgggcacacagaggctacctctggccagagctccaaacagctaccagtagggatgggcaaagaggggaagtcaggtctctctaagaaacatcctagttctgcttctaagaccctccccaccccaaagccatgctgcagctgagttgggggaggactggcagaaaacccaccttttgtggaagctcaggacaggcaggaggagtatctctgagactctcgtgcttttaaagccacaccaacacacagaccctcagcggaaatggcaggatctcattcgccctgagaaaggcccaggccccacctcacagccacgattcctgccctcaaaccccaggcctgcccctccctcccagttctggaaactcaagtctccacccaccaggcgtcttagtctcaggggtaatttcctgggaagtgcaaggatgggtaagaacattttccatcatggttaactgaagtaggcatgaacagcagcagggctgggcgggtgagtgtggtgcagaaagaggtgagattttgtactcccagggtcatgacttggtggaggcctcctgtgggctctgggcttgggcagggaggcatttaaggccattagggtgcctcttgctgcatcagatttgagaagagccccgatgtttttggaagtctcagaagcactcaacaaggtctttcccatggagaccatctcccagtgaccccagccatgtccccaggttggagaaaaggaaaacatttgggccaggatgtcagacagactgaattcaagccccagtaccatcatgtcttgctgtgtgacgcatgacaaatgactccctctctgttctatgcttgggtggttcagtccctgttctccacccccccaccactcccaagaactgactgtgggagacaacttggctcaatggtgagggacatggtcactggctggctctgtcacttcccctcccaaagtctttttttaaaatattctggaaaagaggaataataatggtgtctccaactcttggcatcattgcaaggactaaaagtgatgccagatgtaaagggtctgagaccaggagctgtgcataccagtgccccctctccccagctcctgctagcatccaccaacaactggtgtgtctagtttgtttgtttgtttgagacggagtctcactgtgttacccaggctggagtgtaatggtgcgatcttggctcactgcgacctctgcctcccaggttcaagtgattatcctgcctcagtctcccaagtagctgggattacaagcacccgccaccacacccagctaatttttgtatttttagtagagacgcagtttcaccatgttgtccaggctggactcgatctcctgacctcaggtgatccacccgtcttggcctccaaaagtgctgggattacaggcgtgagccaccatgcccagccctggtgttgtgtctactttgtaaatgtcatccaaagctcctcacttctctccagcccatggctcccaccctggtccaagcaccagtatctcctgcccagacactgcccaagcctccttcctagtctccttggtctccttccactcctatccctgacagtcagtgctccacaacagcaaccacagggaattttttaatgccaatattgaccaactctctctccggaagacacacctctcactctccagggcaccccatgaggtctggtgtgtggtttcagctcctgcctacttcccggggctcccctcccaccctccagccacactgatctgttttcagctcctgacacacctgatcctcttgagtctgaggctttatacattctgttccttctgcttggaatgcccttccccgcactcccactggttgacttctcttcatccctcaggctaaggatttgttttactgttttttgtttgtttgtttgttttgttttgtttttagatggagtcgcccaggctggagtgcagtggtgtgatctcagctcactgcaagctctgcctcccgggttcacgccattctcctgcctcagcctcctgagtagctgggactacaggcacccgccactacgcctggctaatttttttgtatttttagtagagacggagtttcaccatgttagccaggatggtctcgatctcctgacctcgtgatccacccaccttggcctcccaaagtgctgggattacaggagtgagccactgcacccggcctgtttttatttttttaagatggtgtcttgctctgtcacccaggttggagtgcagtggtgcaacctcggctcactgcaacctccacctcccaggttcaaacaattctgctcctgagtagctgggactacaggtgcaccccacaactaatttttgtatttttactagagacagggtttcaccatgttgaccaggctggtctcgaactcccgatctcaagtgatggaccggcctcagcctcccaaagtgctgggattacaggcatcagccaccacaaccaggccctcaggttaagtttaaatgccacttcttccaggtagtcctccctgagccccctcgatgtgaggtcaggagcctcctctgggctcctctgttcttctccatcacagcatgattactttgtcctgtctctgcctggtatgatctgtctccaccatcagcctgtgggcacctccttgtgcatggctgtgtgcccactgtgtgccaagtacagggcctggcacacagtgggtgctaacttaataaatgctttctggataaggtcaagaagggttcagatggacgaactgctcttcctctcctggggccggcccctttaatccccatcagccttctcacctatctgggaccacgctgtcttttctctgtcccttaagcctcaatggtgaacaccacatgggtactgggctcgacctctccaggcaacacaaggcggctcggcagcgatggcagcaatggggtacccgagaagcctctccggatgataccaccaccaagggggctcacaggggccaagccagaatccaccaactcccagaaccactggaagaaaccagaaagacatgagcaagttcttggtcatgggacctctctaggaccctgaagtgccctcacccagacacctggactggcccagagagctgtatctcagtcctactctcctgagtgaatttacctctctgagcctcagtttcctcatctgtgaagtagggatctcaaacgtggggggatataaatagtgcctggtccaggccaggcgctgtggctcgtgcctgtaatcccagcactttgggaggccaaggcgggaggatcacctgaggtcgggagtttgagaccagcctgaccaacatggagaaaccccacctctactaaaaatacaacattagccaggcgtggtggtgcatgcctgtaattccagctactcgggaggctgaagcagaagaatcgcttgaacctgggaggcggaggttgcagtgagccgagattatgccattgcactccagcctgggcaacaagagtgaaattccatctcaaaaataaaaaatataaataaataaatagtgcctggtccagccaggcccagtggctcacgcctgtaatcccagcactttgggaggctgaggcaggcggatcacgaggtcaggagatcaataccatcctggctaacatggtgagaccctgtctcgactaaaaatacaaaaaaattagccgggcgtggtggcgggcgcctgtagtcccaactactcaagaggctgaggcaggagaatagtgtgaacccgggaggtggagcttgcagtgagctgagatcgggccactgcactccagcctgagtgacagagcgagactccatctcaaaaaaaaaaaaaaaaaaaaagtgcctggtccacagtacacattgcagaaatatttatttattaactaataatagcatgctcagtagggcacggtggctcatgcccataatcccaacactttgaaagggtggtttgaccccaggagttctagaccagcctgagtaaaatagtgagacactagctctacaaaaaataaacaaaattagccaggcatcgtggtgtatgcctgtaaccccagctactcaggaggctgaggtgggaggactgcttcagcccagaaggtcaaggctgtagtgagccaagatcatgccactgtactttagcttgggtgacagagtgagaccccctgtatctctctctctctcttttttttttttttcgagatggagtctcgctctttcaaccacatcggagtgcagtggcacaatctcgccttactgcaacttccatctcccaggttcaagtgattctcctgcctcagcctcctgagtagctgggattacaggtgcccaccaccacgcctggctaattttttggtatttttagtagagaggggttttcaccacgttggccaggctggtctcgaactcctgacctcaagtgatctgcccaccttggcctcccaaagtgtgggaattacaggtgtgagccactgcgcccggccgagaccctgtctctaaaaataaaaataaataaaacagtatgtttatttttataacatattatatgctatataatgctatttattataatgctatgcaccatagtgatattctattgtatattttttcttacatttgagattccaatatattatttattaaaatataaaagtagggcccagcacaatggctcatgcctgtaatcccaatactttgggaggccaaggcaggtggatcacaaggtcaggaattcgacaccagcctggccaacatagggaaaccccatctctactaaaaatacgaaaattagccaggtgtggtggcacacgcctgtagtcccagctactcaggaggctgaggcaggagaatcacttgaacccgggaggcggaggctgcagtgagtggagaccacaccactgcactccagcctgggtgacagagcaagaccctgtctcaaaaaaaaaaaaaaagtaaaacaataaaacatgcagtaaataagcaaatgaataataacgatagtactaatggctaacattttctgcacaatcaccctgtataaatgccgttccaatagtacatggatgggctcatgaaggtataatgaagccatttagcaccattatttccatttaacaaaggaggaaatgaaggctcagaggttaagtaactagagcccaaggttgcaattcataaataaaagcaattctgagcttcagtgccgagttccttgaaggaaggactgaatgggagaaactaaatgagatgctgtttccaagcaggctctgggtaaatgctggatacattttaagaacaggcagaatcagtctgaacggatgcgttgggagtgtgagctcttcagcgcaacagatctgggttcaatccaggccacgtggtccagggcaagcggcctcagtttgcccatctgggaaatggaggcgaaaggggtacggatccctcagaggtgttgatgataaaacaatgggacccacgtgcgccagacacaggctgtgtgctgtccgcggtgctgaccccagaatggggcacaaaactggaactcacagctttggggtaaggcgatcagtgaagacaaatgtggagatgggagaggtggggttcaaagagatggcccagtcttcccctactgtcctcctgagcctcaccaatgagcctatctccaccaccagactgagcattaaaactgggaaactggccaggcgcggtggctcacgcctgtaatcccagcactttgggaggctgaggcaggcggatcgcttagggtcaggagtttgagaccagcctgaccaacatggcaaaaccctgtctctactaaaaatacaaaaattagccgagcatggcgctttgcacctgtaatcccagctacttgggacgctgaggaagcagaattgcttgaacccagggggtagaggttgcagtggaaagatctgggcaacagatctgggcaacagcactcaggctggagtgcaatggtgtggtctctgctcactgcaacctctgcctcctgggttcaagtgattctcctgcctcagcctcccgagtagctgggactacagacacatagtccccatctcaaaaaataaaaaagtaaaaataaaaataaaaaagctgggaaactgccaggcatggtggctcatgtctgtagtcccagcactttgggaggttgaggccaaaagtgagttcaaaaccagcctgggcaccccgtcgctacaaaacattttataaattagccaggtgtggtggtacatgtgcctgtagtttcagctcccaaggaggctgaggcaggaggattgtttgagcccaggaggttgagactgcagtgagctatgattgtgccactgctcttcagcccggcttacagagggaaactctgtcaaaaaaaaaaaaaaaaacggggctgggcacggtggctcatgcctataatcccagcactttgggaagccgaggtggatggatcacaagatcaagagatcgagaccagcccggccaacatgctgaaaccccatctgtactgaaaatacaaaaaagttagctgtgcctggtggtgcgcacctgtagtcccagctactcagcaggctgaggcaggagaatcgcttgaacctgggaggcagaggttgcagtgagccgagatcatgccactgcactccagcctggcaacagagcgagactacgtctcaaaaaaaaatggggaaactgaggtccaagaccatgctgctaatcaggaccagagccagggcaaagtggggtgggaggaagagggtgcggagaacggatgtgagttgaacttgaacttctgtgtgtgtaagggatgcaacatagctcatttccttgcctatgagtggagggccctctgactcgtgttgtggaggaagacatcaaagcttggagagaaaatgacctgcttgctgggagtcacacagctgggggcttgagccacgctcagatctcatccttctaggactgttccccgcatttgagcacaacttgtccccaccctttcccaggggcacctgaaatttaaggcagaaatgcaagtgctctacaagaggcctccctcgggagagttcctggtagctgggagggtgtgtcgggaatgaagagggtggggtgtgtggggacagttagcatctcccagatgggaggcccctgagatgtcagctgctcattttcttttttcttttctttctttcttttttcttctcttgtttttttttttttttttttttttttttttgagatggagtctcgctctgtcgcccaggctggagtgcagtggcgcgatctcggctcactgcaagctccgcctcctagtttcacaccattctccggcctcagcttcccaagtagccgggattacaggcacccgccaccatgcccggctaatttttttgtatttttagtagagacggggtctcaccgtgttagctgggatggtctcgatctcctgacctcatgatctgcccgcctcggcctcccaaagtgctgggattacaggcgtgagccaccgcgcccggccaagacagggtctttctctgtcacccaggctggagcgtgcagtggtgcagtcttaactcactgcagcctcgacctcctaagctcaaggatcctcccaccacagcctcccaggtagctgagactacagtcacacaccacaactcccagctaatttttgtattttttgtagagacaggatctcactatgctgcccaggctggtcttgaaatcctgggctcaagcgatccacaaacctcagcctcccaaagtgctgggattccaggcttgagccatggcgctgggcttgtctgcccattttcctgctgggaaaacaaggttccagatgggagaactccctgcacacattcctatttgttcacgtattcattgaacaaatgcaaaaaaataattcacctcgtgttaggaagaaaagaaaactggacaagggtctgggaatgagggagtggatcacattgctggggtgagttagggaattttctgaggaggtggctttgagccgaggcctgaaagaggagaaagagctggccaggagaaagataggggaacagcataccaggcagaaggaacagcacctgcgaaggcccggaggtggcaacaagttggtaggtttaagaaatgggaattggtaagccaggcactgtggctcacgcctgtaatcccagcactttgggaggccgaggcaggcagatcacctgaggtcagtaattcaagaccagcctggccaacatagtgaaacccttgtctctataaaaatacaaaaattacctgggtgtggtgttgtgtgcctgtaagcccagctactcggtaggctgagggaagataattgtttatgcccgagaggcggaggctgcagtaagccgaggttgcactgttgcactctggcctgggcaacaaagggagactccatctcaaaaaaaaaaaaaaaaaaaaaaaaagccaggcacagtggctcacacctgtaatcccagcattttgggaggctgaggtgggcagattgcctgagttcaggagttcaagaccaacctggccagcatggtgacaccctgtctctactaaaaatacaaaaaaaaatagccaggcatggtggcatggggcagtaatcccagctacttgggaggctgacgtaagggaattgcttgaaccagggaggtggaggtttcagtgagccaagatcgcaccactgcactctagcctgggccacagagcaagactttcacctcaaaaaaaaaaaaaaaaaagggaattgggagccaagggccagggtggagggaagttcattgcttcaggggctgggtgaggacttaggatttgattctgggagaatgttgaggttttgaggaatgtgatctacttggggatcacaggaagcctgctgtggccaatttggagagcagggcctatccctggggcagaggctagagcagtggccaggtgatatggaccagagcggggcctgtgagtggatctgagatatgttttgggggctgaaagacaggccatagccacggggtgtgagaaagagaagattcaagggtgactggtgactttttttttctttcgagacagagtttcgctcttgttgcccaggctgtagtgtaatggcacagtctcactgcaacctgcaacctctgcctcccattttcaagcaattctcctgcctcagcctcccgagtagctgggattacaggtgcccaccaccatgcccaattaattgtattttttagtagagacaggatttcaccatgttggccaggctggtctcgaactcctgacctcacgggatccacccacctaggcctcccaaattgctaagattacaggcgtgagccaccacatccggtggtgactggtgattattaagcatgattacttgtttttcagaaagccaggagtcacacagttacctggggaatggggctgccattacttgcatggggaaaattgggggaagcaccaggctttgggtgggttccaatttcgctggagcatcacatgagtcccagatggagccagcagaggcagctgaatgtttggatctggaattatgggggacctggctcaactgaaggtgaaacagacctaacaggtctgggggcagttgccagcatctggctgttggtcagatgcgggggtgctcccaagagccctgattcctgggacccagccagctatccctcccccatctggagtggaatggggtaaggatggggctcccagggactagggatggggtatagtggggtgtcctctggtctcagctgcagcacacatcaacctaccactcctgattttttatcttttatttttgagacaaagtctcactctgttgcccaggctggagtgcagtggtgccatctcggctcactccaacctccaactccctgtttcatgtgattctcccacctcagcctcctgagtagctgggattacaggcgcccaccacgatgccaggctaatctttttttttattttttatttttttatttttagtagagacagggtttcaccctgttggccaggctggtctctaactcctggcctcaagtaatccacccacctcggcctaaagtgctaggattacaggcatgaactgctgcacctggccctgctactcctgattaattgccctcttcattaagaagctgggatggggatggagggcctgatgggaggctcctgggtggggaaggccttcgtaggagaccctgagctacctcccctttttgttttgttttgtttttttttttgagacgacgtctcactctgtcacccaggctggagtgcagtggcgcagtcacagctcactgcagcctcggccccctgggataaagcaatcctcccacctcagcctcccaaagttctgagattacaggcgaccgcgaccacacctagctgagagctcccttttgttgttgttgggttttgttgttgttgttgttgttgtttgttttggtttgttttttgagacagggccttccctcttgtcacccaggctggagtgcaatgacgcgatcttggctcaccgcaacctccgcctcctgggttcaagcgatccttctgcctcagcctcccgagtagctgggattacagtcatgcaccaccacacccaggtaattttgtattgttagtagagacggggtttctccatgtcgatcaggctggtctcaaactcacaacctcaggtgatccacctgccttggcctcccacactgctaggattacaggcatgagccacagtgaccagctttttttttttctttttctttctttctttttttattttctgttgagatggagtctcactccttcacccaggctgaagtgcagtggcgcgatattgtctcactgcaacctctgcctcccaggttcaggtgatcttcctgcctcagcatgccgagtagctgggactgcaggcgcgtgccaccatgcactgctaattttttgtatttgtagtagagacagggtttcaccatgttggccaggatggtctcgatctcttgacctcatgatccgccagttgtggcctcccaaagtgctgggattacaagcatgagccactgtgcctagcctgttgttggttttttgtttgtttgtttgtttgtttgtttgtttgtttgagacagagtcgcactctgttgcccaggctggagtgcagtggcacaatctcggctcactgcaacctccacctcctgggttcaagcaattctcctgcctcagcctcccaggtagctaggattacaggtgcctgtcacaacacccagcttattttttgtatttttagtagagacagggtttctccaggttggcgaggctggtctcaaactcctgtcctcaagtgatccacctgcctcagcctcccaaagtgctgggattacatgtgtgagccaccgtgcctggcctctttgctgttccttaaacctgcctcggggcctttgcatgtgctgtgccatctgccggggacacccttcccccggctgttaaaatggccagctgcttgtttccatccatacttcagctaaaatgtcaacttcccggagaaggccctcctgcccagctcgagcagtctcatgagcactcacccaaccccacattttctcttttttcttgccttaacatctgtctcatgagccctgtcattttggggcctgtcactgcagttctgtgtcctacacactcagcatgtggcttggcacacagcgggtgcccatgtgcaggtgaaatgactgatgctgtgagctgagtgtgggagaggtcatcagaaggtcctttatttatttattattatcattattttttgagacggagtctcgctctgttgtccaggctggagtgcagtggcgcaatctcagctcactacaaacttcacctcccaggttcaaacgattctactgcctcagcctcccgagtaggtgggattacaggcacctgccaccatgcccagctaattttttttttttttttttgagacagagtcttactctgtcatccaggctggagtgcagtgcagtggtgtgatcttggctcactgcaacccctgccttccgggttcaagcgatcctcctgcctcagcctcccaagtagctgggattacaggtgcccgccaccacaccaggctaatttttttttttttttttttgagatggagtctcgctctgtcacccagcctggagtgcagtggcatgatcacggttcactgcagcctcgacctcccgtgctcaagcagtcctcctaccttagcctcccaagtagctgggactacaggcgtacaccaccatgactggctatttttttttttttaatagagatagggtcttactgtgttacccaggatggtcttgaactcctcggctcaagcgatccacctgcctcggcctcccaaagcgctgagattacaggcgtgagccaccgcgcccagactacccttttcctttcctcttcctgcagatggctggagtgtggataaataaacattaaggcatatgcagctacgcctgccctaggagacccgaggctcaccctgagcaccctcattccacacaaagttagcccagttttttaacacacaaaaacgctgagttctggccaggtatggtggttcatgcctgtaatcccagcactttgggaggctgaggcaggtgggtcacttaagatcaggggttcaagaccagcctggccaacatggagaaacccgtctctactaaaaatacaaaaatcagccgggcgtcaaggcttgtgcctgtaactccagctgctcgggaagctgagggaggagaatcacttaaacccgggaagcagagatggcagagagcaaaaatcacatcactgcactccagcctgggcgacagagtgagaccctgtctaaaaaacaaaacaaaacaacaacagaaaccactgagtcctagagaggttaccagccactcaggtgatgggcctgggatttgaatccagcccccgcagggttttcctcttggctcagtttcccagaatgggggcactggctgtgatctgaagttgtgacctcatgacccactgctcaggcccgggggcagccaggtccccttttcttgggtgagtcaaaaccttgtgtccaggcacaagggatctcctgctcccaaaagcagtggccacagccctgggctggacagttggatcaggtccccaattccctggtggcctctctgggcctcagtgggcccctgtgagctggtccccgagcagctctaagtgtttcttttttttttggtggtggggacagagtctcactctgtctcccaggctggagtgcagtggcgtgatctcaactcactgcaacctccgcctcccaggttcaagcaattctcctgcctcagcctccaagtagctggactacaggcatgagccaccatgcccagctaagttttttgtgtgtctagtagagacggggtttctccatgttggccaggttggtcttgaactcctgacctcaagtgatccgcctgcttcgccctcccaaagtgctaggattgcaggcgtgagccaccgcgcctggccagctctgggtatttctcagtagagggtctctgggatctccccaccatggcctgggccacccccaccccctactcacttcactcagcaggaaggagagtgttgtcctgctgtgcctcatgctgctggcatctgtggccctgcagaaatggttctgagacctccagaccactgggagcccaggtacggccctgtgggacaccccctagacagaagctcactcccacactctctgcaccctcccttgaaccccaaggaactaaatcaaggtggcatggaccacaccacaggcaccagtgtgagacacccgcccggaccttgcagcggtccccatccagggacagcagccaggtgcccaaagcccctccccacacctgtccaggttcagcagcctgggtgggggcatcaggactggcgaaacaaggtctcctggccccagacacatgggagacccattcagctcccagagtggctctgatggtttcagggggattacgagaccccagcacctctcctgagacgcccccaagctcaagaataagcttgctccaggaggcccaggcatgtctggcacttaccaccactgcggagtcctgcctgggtcccatgacctgctggctagtgagggaaggaggggagaaaatgacctgaccaagagggaggcccagggctccctcaacacccactcagcggagccccttaactgtctgggcaccaggccaggacataatccacacactttccttgggtgaggctcccagtgggtggagggcagagtgtccaagagggcctgaggggacgagagagtggccaagagggtggccgggcatggagggggaggggcggggagggcagaggaaggaggggggaaggagggaagggaggcgtaggagtgaggaggctgggtgagaggtgttaagattaattgttcatgtgtttgcatatgatagagtgagagagagggcgcgaaggaagatggtggtaggggaccagcagctctgggaagggggggattttatcaactcagggtctaggatatctgcttccaagcagagcccatggggtgtggcctaaggagcttgggggctccaggaaagttgcccgctgtgctgtgccgccccgggtagatcaaagaccctctctggtcattggctgggcgcggtggctcacgcctgtaatcccagcactttgggaggcggaggcgggtggatcacgagatcaggagatcgagaccatcctggccaacatggtgaagccccatctctactaaaaatacaaaaaaattagctgagtgtggtggcaggtgcctgtaatcccagctacttgggaggctgaagcaggagaatcgtttgaacccaggaggcagaggttgcagtgagctgagatcgtgtcactgcactccagtgtgggcaacaagagcgaaactccatcttattaaaaaaaaaaaaaaaagaatggcttgaacccaggagtcagaggctgcagtgagccaagactgcactactgcactccagcctaggtgacagagggagactgtctcaaaaaagaaaaaaagagagagagatggggttttgccattttgcccaatttggtctcaaactaccaagctcaagcaattcacccacctcagcttctcaaagtgctgagattacagtggtaagccaccatgcccggcacccccagttttgtttgtttgttttgagacagggtctcactctgtcacccagactagagtgcagtggtgcaatctcagcttaccgcaacctctgactcccaggctcaaccaattctcctgcctcagcctccctaatagctgggattacaggcacacaccaccacgcctggctaatttttgtatttttagtaaagatggggtttcaccatgttgaccaggctggtcttgaactcctgacctcaaatgatccacccacctttgccttccaaagtgctgggattacaggtgtaagccactacgcctggccctattttttttttttttgagatggagtcttgctctgttgcccaggctggagtacaatggggcgatctcagctcactgcaacctccgcctccctggttcaagcgattctctgcctcagcctcctgagtagctgggattacaggcacctgccaccacgctcagctaatttttgtatttttagtacagacagagtttcgccatgttagccaggctggtctcaaactcctaagctcaggagatctgcccgccttggcctcccaaagtgctgggattacaggtgtgaaccaccgcacccagccaagtgagctcctgattcttatctgtccctgccttgagtctgtggatcccctgaaagtaaagacatggtccccactgtgaccccagcacagagcccagcacatagtaggtgctcagttaatgttttcacacgagtccataactcgtgttttcacacgaggccttggatgaatggtaggggctttatttcctcaggttctgctcctccccaggaaccccagccccatccatgcccccatctctgttggctcctcagggctcactcctggaggtggtgggcaaaggacaatctgtcattcacggatccctgaggaaggaacacacagggaggcattcagacaccaaaaggctctgcagcccaggttggccctgcttgggatagcagctcccccaaccatgccttggccccagggctgagcccccagcccagccctaccttaccatggacacctcgtccaggttctcaaacttggactcattccggtgacagaatctcacagccatgaccacagacccgatgagcaaaagagacaccagcaaacacacgaccaccaccacactcgggttcctgtgtaactcacggggcccagtgtcacctggagctggggaaaggaactcagagtcagcactgggtcctattccccacaagcctaagacacccaccagggcccagagccttttaaaatctgttctcaggaagctgacctctcttccctctccagttgaggctgccactttttaatcatgtattttagagacagggtctcactctgtcacccaggctggagtgcagtagtgcaatcacagctcactgcagcctctatctcctgggctcaagtgatcctcccacctcagcctcccaagtagctaggattacaggcatgcaccaccatgcctggacaattttttttttttttttttgagacagggtcttgctctgtcacacaggctggagtgcagtgacgttatctcagcttactgtgacctccatctccaaggatctagtgatcctcttacctcagcctccccagtagctgagactacaagtgtgtgccaccacacccagctaatttgtgtacatatttagtagagatggggtttcaccatgttgcccaggctggtcttgaactcattggctcaggtgatccacccgcctcggcctcccaaagtgctgggattacaggcgtgggccactgagcccagcctaatttttaaattttatttaatcaattactttatttatttttgagatagagtcttttttttcccccccgagatggagtcttgctctgtctcccaggctggagtgcagtggttcaatgtgggctcactccaacctccgcctcctgggttcaaattattttcctgcctcagcctcccaagtagcccggattacaggcgcccgccaccatgcctggctattttttgtatttttagtagagacggggtttcaccatgttggccaggctggtcttgaactcctgacctcaggtgatcctcccaccttggcctcccaaagtgctgggattacagatgtgaaccaccacgcccagccatttttattttatttatttatttatttgagacagagtcttactctgccacccaggctggagtgcagtggcacgatctcagctcactgcaacctctgccgcctgggttcaagcgattctcctgcctcagcctcccgagttgctgagattacaggcgtctgccaccacgcctggctaatttttgtagttttaatagagacggggtttcaccattttggccaggctggtcttgaactcttgacctcgtgatacacgccccccccgcccccgcccccgccctcggcctcccaaagtgctgggattacaggcttgagccaccgcgccccgccatttttagatttttttgtagagacaaagtcctgctattttgcccaggcccaaatacataatgtataacctgtctccccaccacagcaagtattagtttctctctttgcccatcgctgcgtgcccagccgtgacatacactaggcacttaataaatgcgcatagcatgaagagctttagacaatggagcagagacaagaagcccttcctagagcattctcggggctgtacctccccctggtggtcagttccaaaactgcagcctgttacacccgccacctccctacaaacacccaaatctcttaatactcacctgggccagggggctccaaggtctggtcagtggaggtcaagggctccgttccggggctgtgggaagtggggctccagtgcggggtcagggattcggaactggggagggtggaatgggaagagggggtgagctctgcactgggggagccagaactagggtgcgtgattgtctctggttgtggggaggagggtatcatccttgaatctgtggagctggggctcggctggatggtaggggttgcccctgaacttgaggggctgaggtgggttatggagtctgtctccaaactcatggtgctggagtaggatttggggggttcccctgaactgtgggtgctgtgggcgaagggagaagaaatcagagagctgacaggtgatgtctccatactgttctctgaggtcacaatatctggaaagaaaaactgggcgcggtggctcacgcctgtaattccagcactttgagaggtcaaggtgagagcatcacttgaacccaggaattagagaccagcctgggcaacatagcgagaccctctctctctctctttctctctctctttttttttttctttttttgagatggcgtctcgctctgtcacccaggctggagagcagtggtgccatctcagctcactgcaacctccacctcctgggtacaagcaattctcctgcctcagcctcccaagtagctgggattacaggcgtgcattaccacgcctggctaatttttgcatttttagtttcactgtgctggccagatttgtctcgaacttctgacctcagatgatccacctgccttggcctcccaaagtgctgggattacaggcataagccatcatgcccagccttttcatttttatttttaattaatttatttttttgtccaggtcatagggagacctgaaagatttaggacaccatgtgagctctcagtgggaaactgaagctcccactcaaattcatgctcctggtctgaagtcccacagcctgggttcaagtgcagatcagcgttcccagtcctcttggctgagagctctagaagccctttggatatgggaagtgactgcatcccaggcagtgctgggcagctcctttaaattttctgggactcagttttcttttctgtaaaatggagttcatgtggagttggtgcctctgacagttcatcagtcaggttcatagtgggtgtacacaagctgggtgctcccagctactggggaggctgaggcgggaggattgcctgaccccaggaattcaaggctgtagtgcgccatgattgcgccactgcactcctgcctgggagacataatgagaccttgtctctacaaaaaaataaaacaaaaattagccaggcatggtggtgcatgcctagtcccagctactcaggaggctgaggtgggaggatcgcttgagtccaggagttcaaggctgcagtaagccatgatcatgccactgaactccagcctaggcaacagagtgagactccgtctcaaaaaaaaaaaaaacacacacacacaatagaatagaaacacagtgggtgcacagtgacactcaactataaagatccacctatgagctcagagaggatcagccctaattttctccaggtagccctaggctaacctcaactttaatggaagacacaaagacacaggcgctgggaacatgtctccggaacccacccttctacgtgttggtccagctacttcctggctcacatcccatcccaggcatggagtccagggaccaggctgagggcaggtaagcagttcatgagccacctcccacaacgacttcccacccagttccaggtgactgggcctcttaggcacttacaagttcattcatcaactctctgctccacccatgcactctgctctgggccaaactttgtgcttcctccttgactcaccctaggcagcagaaatgcggaaataacacacaacactggccctgagagggggctgggtccacatgccaccctccccagatctctatgtagccccccaggccctgtggggatgacggctgagtctagaagaggcatggaactcaggctgggcttcatccccatttgacagatgagaaactgaggctcagagtagcagagggtctggcctgaggtgactggggagctgggaagaacgcccctcaaggacccttgtcctctgtttctgctgaaatgaagatgattcagaggccagagtggaccccaagccaagtcagaattctggggagctgagtgcttagtgaactgaggaaaagctgtggacttgaaaaaggaagagttggaggacacaagccctgttgagtgcctggcactgagtaggcactggtgagctgctgaagggttgaccagaaggtaaaaataaagatgtttctaggcactgtgctgggtgtttgctctccccagagactcctagactgggaggctcacatgagccaagtcaaccagttctaatctgggtctgggacaagctggactgagcctcagtttcctgagctatgaaatggggataaaagtggtgccttctgaatgaaacccttccctgcaatgagcatttcagcagccatggtggcctctgctctgctattacaggtctgtggggtaggacaccggtcagagagagtgacaacatagtggcaggtaaagggcagaaaaagggaatgcgagaagctcaaggctcctcccctccaccctaggcactgtcttataggagagcaagagggaattaagtcagacacccagaagaacttctcatgggaaccacagatgtttgatgaccaggaagtgagtccctgttccctggaacccccatggccctgaggtcttcaccattctccctttggggattggctaaaagcaacagatttgaaaaggagcccaaaagtaggtgtgaggccatctgtggcctccagcaggttcagggctcactggagttgcaggacccacagccccagggcttgggagcagcggtgcctcatctgtcctcacagctgctccgtttgtttctgggggaaaacccagccttcctcggagggttggcggaccagcgtggcctgagggaggggtccagaagccaggtgtgtgactgggctgtgcgtcccccacccccacccttccgctttctggaagctgagcctctttaccagctcttacctgtaaagggagtattgtaattcacaccagctttcagcagcaccaccagcaccaaaagcagaagtggcggcagctgggggcacgccattcctgcgccgggagggcctgccaccggctctgcacaggtgtgtggccaggtgtgtgcccaggtgccagctccttgcacctgcgtgtgcgctccctgctggcggagcgcggggctgtgcaggggcaaggcgcaggtggggctgcagggtgtgggacctccctggggcgctcctgttcccccgggtgcggttctcgccctcttcacctggactccaccccttctaaacacgacgacccagaagctctcaaagccagtcatccactaaagacaccctgcccctgccgtcctctttccccctgctcctggttccacagctgcccaaacccctgctgtcactccctctgcccctcgtccagccaggttgtcccctctgggagcaccaatttctcccacctccctccgatccctgaacccacagggctggggatgtccttgttctctgtcctcgtcctcctctgtcctctgtctcacccagactggggccttttggggacatgactgaaaccttctaaccttctagcatttctattatggatttctttttctttcttttattcttttttttttttgagacggagtcttgctctgtcacccagactggagcgcagtgatgcaatcttggctcactgcaacctctgcctcccgggttcaagtaattctcctgcctcagcctcccgagtagctggcgcccgctaccaggcctggctaatttttgtattttttagcagagacagggtttcaccatgttggccaggctggtctcgaactcctgacctcaagtgatccacccgcctcggcctcccaaactgctaggattacaggcatgagccaccgtgcccagccctttttttttttttttttaagagacggggtctcactctgtcgcccaggctgaagcacagtggcacaatcacagctcactgcattctcaaactctgggattcaagcaacctcccgcctcagcctcccaagtagctgcgattacaggcgtgtaccaccatgcccggctaattttttttttttttttttgagactgagtttagctcttgttgcccaggctggaatgcaatggcacaatcttggctcaccacaacctccgcctcccgggtccaagcgattctcctgcctcagcttcctgagtagctgggattacaggcatgtgccaccatggccggctaattttgtatttttagtagagacggggtttctccatgttggtcaggctgatctcgaacttctgacctcaggtgatctgcccacctcggcctcccaaagtgctgggattacaggcgtgagccaccgtgcctggcctttttttgttgttgtatttttttttagtatagatggggttttaccatgttggccaggctgatagctctaactcctgacctcaggtgacccactcgtcttggtttcccaaagtgctgggattacaggcatgagccaccacacccagccatcctgtaggattttttaggggtgagggacttgaggtgagtgctctgggccaggtcccaggcacatttctagagtgcactggggacagtttccatctgggacgggctggacaccaccccactacctgtacgtggatatggcagaggcacagctgagaccacattggcagtgcctgacctccaggaaagatttgaggtccccatgctggccacagaccccagatgcatactgcatggttggtaacttcagagttctcttccctctgggatgttccagattcccccactatacccaagccacttccattaacccagaacacatcacccaagatctaggctgtggaggactttattcattagacccagagagccatgagtgcctcccacgaagtccccactgcagggagccagggtcctagatgccaggccaatgcatgtgccgtgagctggccgaggggtctgctggtcccaagagcgcctctgtgttcttcagacagctccgggtatggtggcctcgccaggtggcttgaactatcttcgctgccatttgctgctgcctcatctgctggcggatcttaaagcccctccaggcggactggatggctgtggccgctttgtcctggcgatgcggctgcctgggactcagggcagccagctggtaggcggaggcccaagacactgccccggggccctcagtgccctggcccatgccctgcaccacacgggtgggctgtgtgcgtccacaggtatgacaggtgcgagggctggagcccactagcatcaccacgctgggcgggctcccgatcctggagctcagggagtggcagacgctgcaagcgtgtgcctggcaggactggaagcagcgatggtcagatactgtcctggctctgccatcctggaaccagcttcggtcagacatgaccccggcccggctgcccagctccacccacgtgacggggtggagcatctgccagtgccgggcttggtcccggcgggtgctgtagccgcgccaggcagactggatggtcgtggtggctctgcagaggtgtgccaggttccgccgcacacggtagccgcgccaagtagcttggatgaccatggccccccggtgccacagccggatcctgcgacgcgccaggtagccacggacgcccgcctggatagtgatcactgcgaggatgcggatctcctctgcagcctgcatggacaccattggctccccggaccgcctgggaggcaccaccgccttgttgcgccaggtgtcccaggacgcagcacccctggctggctcccatgcgcggttccacgattggccaccaaccacaccagcgtccgcggggccctggagtatagtggagttcagggatgccttgtgactaacggcaggattctgggggctataggagtcctgccgtctccacggtgactcctggttaaaaaggggtggcagggaaccacttggggaagactcatagcctagagacaccctccgaactcccggggccagcggaggaatgaccgaggagtgtgtcatctccccagtgcggatgacgggccttacctctgcagagggcctgtgggtggggtttgcaccacttcgggctgaggcctgggatggttgtctttgcacatactgtaagggcctaaccctggccacagaactttctagcagttctggaacaatcctaccatgcacggatctgtaggaatttttagggcccatggcgtcccagcggctgctcggagccatgtttccagacactgttttctggagtggattggggacagcttctgtctggaagggactggacaatgcccttctagccgaggacggatatagtggcacatgtgagaccatgctggtggtccctgacctctgaagaagactaggattccccatcctgcccacagacactgaaagcaatctgaaagcctcagtactgccacgggccagctggggtgatcctgagactacattagaagccactgtaccctgagagtgatttgggggtatgacgtgagtgacagacccctgttgataaactgagggggacttagtggctaaacccggggcctggaaagggacagggaccatgccactagcatggctgggagccacctcccttggggaagagaccctttctcagacagggacctatgatcatggcccccatcagctcccagaggactggagtacatccactgggttgcaccagtgaccctggctttgctgaataggtcattggatccacttgatcctgacacttggaacacagcctcatccaattctcctagcttggcttggtcccctgtgaccccagatggcattatcctagcatcttggctcaattgtaaggctcttgatagaaccgtgggcactcggtgtagactcctcactgtgccactagctgccggggctgaggagtgacctggagccagactggtggtgtggggcatctgcaagggggctaaagacctctccccagccaggctttgaggtaaggaggggcagtgatgtcaatcaccatgggccccttggagcagctctgagccacactagaggcccccatcattggcacagaaccagggggacaactgggctcacccgactcactactgaacctgggagcaagtttggagcagctaagctagcggagggtcttacagatagacttggcttctttctgtctgccatcagactgggagccacccaactggacacagagcctgcgggaaggctgtgacccatgcctcggatggtggagcccgggggaaggctggaggttatgccaccaggcagagtgcctgggactgcgcccgtgctcattctactggctacaaaacctcctgccgcaccacgaccagccctgctcttcagagagtcctgcggaatcacatctctctgctggtaactgggtgggaccatggatgcctcagaagggtgccagcagtctatgttttttggaataaccacactgatctgggagctgctggggtccatgctgttcagggaaagattagactgagtcacggccagtctgttgggcactgaagccagagaggggctgggggccatccctgtggttccagagggatgtgtcaaagggccacctgcctctaagacctgggatgcaagggaagccatgccattggccacctgacattgactttggcccatgccagttgctatggttctccaggggagattcccagctaggccaggagatgtggtcccctgagacccactggggaacatagcatcagccaaaggctcctggggatggcttacagccacacccctgaacagaggcgtgattcactggcctacacaacaggcctcctcatcagcatgagagagatttggtgttgaaacactaaccacagagggtggacacacatgcctcccaccaaccctgggtggatgatggaacccaagggacacgtcgttgaacttgaagtccggggggctggataccatctcactaaccatcagaggttcttcacataggttcaccccagtacccagggatggctggttcagaccctggtccatatttccagccacagagggatatggtccacccaggctaactgaaacaaacgctgatgggtgacacagacacggggctactgagtccacccttgaacactgcagatttgaatccagcctagagccccagcatggctcattgaggccatgacatgtaccactgaccacagatggctgggatcggcttggggccaacctagtgtccgggggtgactgagccaggcttagggcttccgtgtgggccacagatggtgggaataggctgggggctatagctggctcggctaggctggaggctagggtacaggatgaatttgtcttgcctggactggaggccacagatggttgggcttgccttggggatactgcagtggtctgagatgggtgggctaggctggagcccgccccactggccacatatgggtgagctagacttggagacaacccatggggtcctgatgggtgggctaggcttggggacacaccaatggcttgagatggctgggctgggcttaaggacaccacacaggtcataggttggtgggctagccttgaagacatccctgtggcttgagacggctgggctaggcttggggatacaccacaggccataggttgatgagctggtcttaagggcactgcagtggtggcctgagatagctgggcaaggcttggggacacctcactgggcatagatcgatgaacctggcttggggacaccatacaggtcatagatgcatgagctctgctaggggacatcctgctggttatagatgcgtgagcttggtttggggacaccctggaggccactggtgggtaatcttgtctaggggacatcccactggcttgagatggctgggctaggcttgaggaaaccctactggccacagattggtgggctacacttggggacaccccagtggcctgagatggccaggtcaagcttggggattccccagtggactgaggaggctgggccaggcttggagactcccgaatggccatagatgggtgagctagggttggggacactccaatggtgtgaaatggcatggctaggcttggggacactccaatggtctgagatggcatggctaggcttggggacactccaatagtctgagatgacatggctaggcttggggacactctgatggtcagagatggctgggtcaggcttggagactccccagtgggctgagatgggtaggctgggcttggggacatctcagtgggctgagatgggtaggctgggcttggggactccccagtgaccacagatgggtcgcctgggcttggggacacctcagtggccataaatgggtaggctgggcttgggaacacctcagtgcgctgatatgactgggccaggcttggagactccccagtgaccacagatgggtaggctgagcttggggacacctcagtgggctgagatggctgggcaaggctaggggactccccagtggccacacatggatagtctgggcttggggacacctcagtgggctgaaatgggtagcctgggcttggggacacctcagtggccatagataggtagcctgagcttggggacatctcagtaggctgagatgagtagtctgggcttggggacacttcagtggccacagataggtagcctgagcttggggacacctcagtgagctgagatgggtagcctgggcttggggacacctcagtggccacagataggtagcctgagcttggggatatctcagtgggctgatatgggtaggttgggcttggggacacctcagtggccacagatgggtattctgggcttggggacatctcaatggccatagataggtagcctgggtttggggacacctcagtgggctgatatgagtaggctgcacttggggacacctcagtgagctgatatgggtgggctgggcttggagatacctcagtgggctgaaatggctgtgccagggttgggtactccctaatggcctgagatgggtaggttggacttggggacacctcagtgggctgaaatggctgagccagcattgggtactccccaacagactgagatgggtagtctggacttggagacaccccaaaggcttgagatggctgggccagatttgaggttaccccaggggcttgagatggctgggctaggcttgagggctccccactgtccatagatggctgggctaggttttgggacccccagttagccattgattggtgaccttggtctgaggccactctaaaggtccttgatgggtgtcctcggcttggggacctcctagtcaccacagatggctgtgctggtcttggtgtcactctattaggcacagaggagtgtggtagccttggggtcacccaattacccatagatgggcaggttagccttggggataccttactggatgctatatgctgggataggcttggggccagcctactgaaccctgatgcctggcctaggtttggggctaccctactggccagtgtagcctgggacacaattggggccaagctcttggccacagatggtggcttatatgcagtggagaccacagtacctaaagacagagtcctcctcagctctgtcttgacggttgcctgggacacctcaatcagattcacagagctcttgcctaaggagaacttgtggatctcagcctctgagccccagtgaacacgcaaggtcaagcagttagacactgagctgtgttggaaactgggcactttctccgaggctggagtgggccggtaggggaagtgtagggtcatgtacctatagccggtttcagtctcttgcgtatccttaaacctctggagtgtccccatggactccggaggaaaaacagacttcaccgcaaggtccccttctaaactgctttcccgtgactcatctatcttgttgacggcaggcaggctggccacagacatagtggaaaggctgagggaactagaactttgcagagagctttcggaattgttctcctgactgtaggtcacaaagccctgggagaagctcctggccaggtcaccgtctcgatcctgtggcaaaccacctactggctcaccgaggatggatggctggtggtctgttgctagcttctgggggcagagcagggcagacacagaaccctgtgttcgattcctcccctgtccacagacagatgtcttgggacgaacttgagccaatgcactgccgggggaagcttgaaacagaccatgagtcttggatgcctgagttttggtcaccatggtgacctgcaagggacttggggcccccttgtctatcacctccctagtacccgggggggcctgtttgcgatttgggggctgatacctcctccccaggctctccctggaagccctggatgcctgctgctggcctctggccactaagggttggtagagaccacgatgtacccctgaggactgacaccaaggcaggcccccacaggtgaggtaaggctggtgaacatgggcagccctcccaccacccacgctgcaaggaagcctacccgaggccaccctgccctccctggtcgatagataagaggccaccctgctgaccacatgtggcctgtggcagctcggggctgtgccatagatcacagagggctggttcatgcttgggcccacacagttggcaatgagaggctgccacagactcgggggtggctgcatgtgggacagcttgagcaaactggggccctccccactcccctcggggttaaaatctgatgccaatgtgccaggctccagggtcgggcatgcttcttccttttggaacttggggctcaaatccaggtttgaggagaagtccctgctggactccatcatctcccgggacagcatgggatacaggccagtgatcaggggaccctggtgaatgctggtgatgacgctacccatcaccgaggctcccacagtgaccacagataagcagggtgacccccacaagatggccccatcaatcccccatctcctccaagggcccggcaggttggcccatggtgaaacaaccccagatcccaacctgggaatccctgaccttgctggtctgtggtctcacggggcccagggagggcccccatgcggccgatggactcctcctgcaggccaccttcaccagggccggcgtcttagtcaccccgcttcctgttgatttcgaggcggccttggggaggatggttccagtcctcagggccacccgacaccaagactggctcaggagagcacccagctcaccctgacacagggcctggctcagagccacccactcctcctccgtcaaagccttgctaagcacctcggccaatttaccctgcatgaccttggtgagttccgcccgcagctcgccccgggacagggctcgggacagggtcaggcgcagctcactccaggacagcgccttcaccagcgccatgctcagcatgctctggggcagggctttggtgacagtggcacccaggacctccttggacagggcctggttcagagctgcccagacttctccctgggagagggctttggccaacagagtgcggagatcctcctgggatgccagcacaccagctacttcagcacacaaggaggccagcagggagcctaccgtgtcctcctggcagggcaccgcctggccgggcattgatggctgggcacgtgtggctccgttgtctccccaggactcaacgttgcatgtggaatggccggtgggtgccatcggcggcaccagcataccctggacctcacaggctgccgggcatggtcccccctgagtggtcttccccggcacgtgtccgtggggctgtggctgggtctgtctgtcctctggcttggcccagggtggggcgctgaggccaccgaggcgctggcaggcgtggttggacaccttggaccctgttaggagcacctgggagtgggtgttgctgctgagatcagcagcctggtgcgctgggatgaggcacgtggttatgtctgtgatcggctgcccccgggactgcgtcttggtcagacaggtggctagaggcgcttgggactggaccttcacggcacctgtggccagatgtgtctgggaatgcatcttgctcagacaggtgtccagatgggccagggatggggtcttggtcagctcagtgggcagatgtccctgagatgaggccttggtcagcggggcggccagtggtctctgggacaggcagggtggatgtctctgggatgaggcattggtcagtggggcagccagctgtccccggggcagggtgacagccatgtctacaggcacatacacgtgaggtggcttgtccccttcctcagcaacttttgtccaggatggagccccagccatttccactgccacactggtcttaaatgccatgtctgttttcgcctgtttctgggtgccagtcttgattttctcggcttccaaaggaagctcagctgcagccctggggaccccagttcccggatgtggttgagccaggcacctgatcttcccctcagccaaataggagggggatgaggctttcaccacctttgcagcctgcttcacattcacggtggccttggccttgggtgggttctcatggatggagcctgaggtgttgggagttccggctgctaccgccacttggggtggagccttgacatttgccactgttggagaggccagacacagagtcttgaggatggtggccaccgagcgtaactgggctggggtcttggttatcatggctggcaggcgggtctggggtgagggcttggtcaccccaactgggctcctctgggatgaagtcttggacattgtggctgacagacatgtttgcaatgggtttttggctggggtggtgaccgggtgcatctggggtggggtctttgccatcgcaggccccgggcatacctggggcaggctcttcatgatggaagccagaagggaaacctgaggtcggttctttgccgtgatggtcgcagggcatgtctgccgtggggtgccagttctggaggctgtggggtgtacctggatcttggtcattgtgggcatggggcatgtgtgaggtgcagttttggtcactgtgggccccggatacatctgggctggggtcttgattattgttactttgggaactgggctagtcttgggtggggtggtggtcatcgtggacgctggatatgtctgtggcagggtcacggagaccactggatatgtctggagtagagtcttggtgatcatgggccctggacatatctggaagggggctttgggggtctctgctttcacagggccctgggtttgggctctggatggtctcgtaactgcctggtcataccttctggacaatggtgtctccggagccctggctttgttggtccgggcacttacacgtttggtcttcactgagtcaccctctatgtggacgaggcaggtgcttctgatggttctggtcagcaggcatggctggcattttgcgtccagactcactgggcagggaaatctgatggtgaccgtctggtgtggcaggaaggccagcccccggactctggcagcatgaggaccctgcacacagggctctggggtaccctgagctgctgggggctgcaggaggggggacgactggggtctgcagaggaccagattgtcacaggaagggaactgggtctccttgttcaccatgatgggcggggacagaaggcggttctcttccggatgctggaagcgcacctgctgtggggcgtgataaggtatgtccccctcctccgccctcgttttctttaccaacgacttgctggagtgaaggatgtgtctcttgttgaagcgccgccaggcctcctggatggccttggccgccatcatctgggaaatcagcttctgccggagccaatagcccctccagttggcttggatgagcgtggctgcacgggcgtgcatcatgtccatctcgtctaccaggatgttcttgaaggcctggctctcgaccacagcccggaggcgtgggacgcggcgggacgccgtcttgccttcggcaggctgttgcggaagatgctccttggacttgaggccctcgtgctggggctgtggaggcgctttctccattttgtccaggagactggggtgagcgggggctggaggatgcaccgcccactgggtgacaactggctcgtgaactgtagctaggcggccggctgcattgccttgattaccggacaggtcagctctgcctgtgggggcggcagggggtggtcagggtgtagcaggtcctgcaaacaagaggtctcctggctggggtggacactggccccccaggcccagatcttgttcctggcacgttgcgatcttccgcctccctttttccatccctccctctcccaagtggtctttgccatccttatatccacctctcatcaccctacggccacttcatcttggcacacagtgtatgacacctgaatgcccgaccacttacctgcttttcttttttcttttctttttttttttttttttgagacagagttttgctcttgttgcccaggctggagtgcaatgctgtgatcttggctcaccacaacctccgcctcctgggttcaagcgattctcctgcctcagcctcccgagtagctgggattacaggtgcacgccaccatgcctggctggctacttttctgtatttttagtaaagacggggtttcaccatgttggccaggctggtctcgaactcccgacctcgggtgatccacctgactcagcctcccaaagtgctgggattacaggtgtgagccaccgcgcccggcctgcttttcaaactttatcttggatgtaccctgggtttagcactgatcacaatgttttggaaatttcctgtttgcctctgtgtgtgtgtgtgtgtgtgtgtgtgtgtgtgtgtgtgtgtgtttgaaaaagagagagagagaagtgtggtgggggagattatttgcctctccccattgattgtgaatcctagaagacagagtcatttctgtgtccccatctcagtcatagagcttggttccaagctgtgaatgggtaggtattgggtggggggggcatcttgactgataaatggtgagtggattggaagttggatggacagatagatacaggactagatactgaatggatgaatcagtcgatgagtgaatggtagatgggttggaaagacagatgaaggtttggatgaataggtaaataaagctgatgaataaagtgttaaaggcaaattggcccggcacggtggctcatgtctgtcattccagcactttgggaggccaaggtgggcagattgcttggggtcaggagttcgaggccagccgggccaacatggtgaaacccgtctctactaaaaatacagaaaagtaggccaggcacagtggctcatgcctgtaatcccagcactttgggaggccgaggtgagcggatcacaaggtcaggagtttgagaccagcctggctaacgtggtgaaaccccatctctactgaaaatacaaaaattagctcggcatggtggctcgtgcctgtaatcccagctactcaggaggctgaggcaggagaattgtttgaacccggtaggcagaggttgcagtaagccgagatcgcgccacctcactccagcctgggtgacagagcaagactctgtctcaaaaaaaaaaaaaaaaaaaagagccaggtatggtggcatgagcctgtagtcccagctagtcgggaggctgaggcaggagcattgcttgaacccgggaggaggaggttgcagtgagccaagatcacgccatcacactccagcctgggcaacagaagtgaaactccgtgtcaaataaaaggaaagaaggaaggaagcaagggagggagggaaattaaagagagctggaaagactggtgaagagataacccaacaggaggtagactgatgggtggatgggtgggtgggtggattaggggatgggtaggtaaatggcatatggaaggatggaaagaaggaagaaaaagtggtgactgtggctttcagaagtaactaggatgcagagagagctgggacactgtcaagccaccctgatgcatagcctggagcacagcacacttgtttggcagaagcccctctcttcaggttggactagccagaccccttgcccatagaccatcttcttaccttgaagggtcatagatttggaggagtagcaggagaagaaggtgcaatctcagaagccagcctgcaagaggaggcagccttcagcctttcatccatgcaatatgcagcaacactgccctgggctggctcaagaccaacacaaaaagaaatgttaaaagcaaaaatgctaaattctaaaatttctaaattctaaaaaagctaaattctaaaaaaaaaaaaaaatgtgcaaagatgaggaaatttattccagtgttattttgtagctagaaatcaaacaaaacaactggaaataaccaaaacagtgattggtagaggttctgctacaaatgaatacagaagtatgttcaaggatgtttaacactgtattgtttagcagaggaaaaactggaagaaaccaaaattatcaatggagacaggcttaaattaatcatacaagggcatgatatccaggcatcagaaatggcgtccaggctgagcacagtggttcttgcctgcaatcccagcactttgggaggccaagatgggaggatcacttgaggacagaagtttgagaccagcctgggaaactaagcaagaactgtctcttaaaaaaaaaaaaaaaaaaaaaaaaaaattggccaggcgtggctcacgcctgtaattccagcactctgggaggccgaggagggtggatcacctgaggtcaggagttcgagaccagcctggccaacatggtaaaaccccgtctctactaaaaatacaagaaattagccaggcatagtggttgacgcctgtaattccagctactcaggaggctgaggcaggagaatatcttgaacctgggaggcagagatttcagtgagctgagatcgtgccattgtactccatctggggcaacaagagcaaaactgtctcaaaaaaaaaaaaaaaataggccgggcacagtggctcacgtctgtaaccccagcaatttggaaggccaaggtgggtgggtcacttgaggccaggagttccagaccagcctgggcaacatggtaaaacccgtctctactaaaaacataaaaattagccagtcatggtgacatgcacctgtagtcccagctactcgggaggctgagacaggaggatcatttgaggccaggaggttgagactgcagtaagctacgatggcaccactgcactcgagcctgagcgacagaatgagaccctatctcttttttgtttttaaaacagagtcccacccttttgcccaggctggagtgcagcgtcacaatctcggctcactgcaacctctgcttcccaggttcaagtgattcttgtgcctcagtctcccaagtagctgggatgacaagtgtaagccacggtgcctggctgagaccctgtctcaaaaaaaaaaaaaaaaagattgtgattaaagagtaagtataagataaaaggtaacctgggaggccaggcatggtggctcacacctgtcatcccagcacttcgggaggccaaggcaggtggatcacaaggtcaggagttcgagaacagcctggccaacatggtgaaaccccgtctctactaaaaatacaaaacttagccaggcacagtggcatgcacctgtaatcccagctacttcagaggctgaagcaggagaatcacttgaacccgagagatggagattgcagtgagccgagatcacgcaactgcactccagcctgggcgacagagtgagactctgtctcaaaaaaaaaaaaaaaaaaccaggcgcagtggctcacgcctgtaatcccagtgctttgggaggccgaggtgggtggctcacgtgaggtcaggagttcaagaccagcctggccaacatggtgaaactctgtctctactaaaaatacaaaaattagccaggtatgatggcaggtgcctgtaatcccagctacttaggaggctgaggcgggagaatctcttgaacccagtaggcaaaggttgcagtgagctgagatcataccattgcacaccagcctgggtgactgagcgaaactcagttcaaaaaaaaaaaaaaaagataaaaggaaactctatgtggtactttagggctgagggagtatccccaaaaaaggggcaaatttggagagcattcagacttccttggagaaagtatggtcccgcctaacaagttaacggagataattgctggatcggccaagccagagctggtctggagttgcaaaacaagcaaaaggcccaccctccagggtgcagatgtgggaacaggttatcaacagttggtgctctggatgtgcactggaaacctaagtgttgctggggcaggaggccttcaatgtgtatgggccaccgtgggggctctgttcgtttattatcatttatttatttatgatttttgagacagagtctcactctgtcccccaggctggagtgcagcggcactcagcatcttggctcactgcaacctccgcctcctgggttcaagcgattctcctgcctcagcctcccgagtagctgggattacaggcatgaatcccaccacacccagctaattttgtttgttttgttttgttttgtttttggagggacggggtttcaccatgttggccaggctggtctcaaactcctgatctcaggtgattcgcctgcctcggcctcccaaagtgctgggattacaggcgtgagccaccgcgcctggcctttttttttttctctctctcttttgagttttgttcttgtcgcccaggctggagtgcagtggcgcgatctcctttcactgcaacctctacctctcggtttccagcgattctcctacctcagcctcctgagcagctgggattacaggcacctgccaccacgcctagcaaatttttgtatttttagtacagatggggtttcatcatattggtcaggctggtctcaaattcctgaccacaggtgatccacccaccttggcctcccaaagtgctgggattacaggcatgagccaccgcgcccggccttaggggctctgttttttgtgtgtgttgagagggctgcagaaaggttttcaccaggtcaagactgcaaagtcacaggaccacgttctggatccagggctcgggcaggcttcacctggtgtcttcacacctctatccctaatgcctcaccagcgccctctattgagaaatcttagcattgtgctcactttttttttttttttgagacggagtctcgttctgtctcccaggctggagtgcactggcaccatctcggctcactgcaagctctgcctcccgggttcacgccattctcctgcctcagcctcctgagtagctgggactacaggcgcctgccaccacgcccagttaatattttgtatttttagtagagacggggtttcactatgctagccaggatggtctccatctcctgacctcgtgattcgcccacctcggcctcccaaagtgctgggattacaggcgtgagccaccgcgcctggccgagcattgtgctcactttaaacaagacataacgaaagaaattcctttgtttatcacatattgaaagggtccattcggagacaagaggcaatgcatggataattgacacacatatatttattatttttatttttttgagatggacggaatcttgctctgttgcccaggctgaagtgcagtggcacgatcttggctcactgcaacctccgcctcccaggttcaaagtgattctcctgtctcagcctcccgagtagctgggattacaggcacttgccaccacacttggctaacttttgtatttttagtagagttggggtttcgccatgttggccagactggtctcgaacccctgacctcaagtgatccgcccgcctcggcctcccaaagtgctgggattacaggcatgagtcaccatgcccggcctaattattattattattctctttgagacggaatttcacttttgttgcccaggctggagtgcaatggcgccatcttggctcactgcaacctctgcctccaggttcaagcgattctcctgcctcagcctcccaaatagctaggattacaggcatgcgccaccacacctaatttcgtatttttagtggaaatggggtttctccatgttggtcaggctggtcttgaactcctgatcacaggtgatctgcccgccttggcttcccaaagtgctggcgttacaggcgtgagccaccttgcccggcctaatttttgaatttttagtagagatggggtttgaccatatgggtcaggctggtctcgaactcctgaggcaggaaaatcacttgaacccgggagacagcagctctgggagctgaatgggcccattccaggggctgaggtttcatcaaccaaacggtgcagctctttagaggaactcaaccagaaggggtgagaaacgggattgtgggggatgagaagaaggaacaggggccccctggacacagaagccaagcgactggctcggtaattttgagtaaacccctctgagcctcaatttccctatctgtcacaagacataagatcaccatcctcaggttgccaaagagacacaacaggctcagctgggcgcagtggctcctgcccgtaatccaagcactttgggggaccaaggtgggaggatcgctgcagcccaagagtttgaaaacagcctgggcaacatgtctctatttatttaaaaaaataataataaagagacataacaggctctccatgatgtcccccatcacaggtgaacaaatccaccatcaaggctttagaggtccctagagcccctgctgtgaggggccaaggagctgacccatcatttgcagtcacccagaaggcccagaagggctctaaaggcactgggggccagaggagaacgacagggtcccccacgaaccctcgcaaacaagtcctccaccagccccactcacccgcccctgaagccaccagccccactcacccgcccccaaagccaccagccccactcacctgcccctgaagctaaacctagcagtctgaacggccagtcttggagccctggtgccgcagcagctttgtgactcaaagccaagttctggccaatccctggcagctcttagggggtggggattctagaaggcacagccagaggttggggaacaggatgcagggcagggccaaaggtcatggtggttgctacctacaccggctcatcctgagtacaaagggttctcagcacagagggaaccccaaatctccccctccatgtacctagaggcagtttcagtctttcatcccacgggcattttctgagcacctactatatgctggaatttgccccatgtctggggatacaaacaactcaaagaatttgaggctgtaaaatggctagatgggaagggaccaaaaagggggtgcaacgggccagtcagggttctcactgatgtcttgggtgtggctctgagactgcgggctccttggggtggggccggacttgatctcttgggatccccactgggcccggcaaaagtgggtactgaccctgagccgcagcgctataaggggaagtcaggctgctgtcctggatcacctcctggggctgggctggggcccagcatgagtcaccgctggctgggccaaggctgacacgcaccttggactcagtgcagctggctccagccaaagccagcctggcccagaagcctctgcctggcttccttggggagccgctgggggttgccgggacaagaaccagcaggggtgcctgacctccctctgcagcgatcaccccctccaaaaccttccctatactgtgggtgtgactttggacaaaatcagggacatggcagatggcagttgggtggggtttatatcctttgtctgttttttgagattgagtctcgctctgttgcccaggctggagtgcagtgctacgatctcagctcactgcaacctccacctccccgggttcaagcgattctcgtgcctcagcctcctgagtagctgggactacaggtgcatgctatgacgcccagctgatttatgtagttttagtagagataggatttcaccatgttggccaggctggtctcaaactcctgaccacaagtgatccgcctgctgcggcctcccaaagtgctgggattacaggcatgagccactgcacccagctcatcctttggatgtttcatcagaacaggtcccttctgtgctgtcaacgagctaaacacaaactgggagttctcagggcaattggagaccgtaggagcccagtaaggtgctggcctagcctgagggttactagggacaggcttccgaggactgtgcagctgaggctgggaggtggcgctcagctgcatgactgggggaagagtagctggcacagaactacagctgcagccgtgcaaagaccctgaggccaggaaggcaggatattgggaatttgggtggagaggctcctgaaaggagacactggccagcccagggactggtgcagtcaggactttttccaaaaaggtttcaagtaaggagtcagatctgtgatttagaaaaagcccttcacatcacagctcatgcctgcttgactcccccatcagactggagggctggcctcaactaggtgtcaataaatgctggggacgctgggcgcgatggttcatgcctataatcccagcactttgggaggccaaggcgggcagatcgattgagcccaggagtttgagaccagcctgaccaatatggcaaaacctcgtctctactaataatacaaaaattagtcaggcatgatggcaaatgcctgtaatcccagctactttggtggctgaggcaggagagtcacttgaacccaggaggtggaggctacagtgagccaagattgcaccactgcactccagcctgaatgagagaccctgactcaaaaaaaaaaaaaaaaaaaaaaaaaaaaaagaggccgagtacagtggctcaatacctgtagtcccagcattttgggagaccgaggttggaggatcacttgaacacaggagttcaaaaccagcctgggcaacatagatcccatctctacaaaaaaattatttaaaaattagtagggcggctgggcgtggtggctcacgcctgtaatcccagcactttgggaggccaaggctggcggatcatgaggtcaggtgatcgagatcaacctggctaacacggtgaaagcccatctctattaaaaacacaaaaaaattagccaggcatggtggcaggcgcctgtagtcccagctactcaggaggctgaggcaggagaatggcgtgaacctgggaggcggagcttgcaatgagccgagatggcgccactgcactccagcctgggcggcagagcaagactccgtctcaaagaaaaaataaaaataaaaattagtagggcatggtggcgtgcacctgtggtcccagctacttgggaggctgaggtgaggcaggacaatcagttgagcctaggaggtcaaggctgcagtgagctgtggtcttgccactgcactctggccaaggcaagagcgagacctcatcttgtaaagaaaaaaaaaaacaaacttgtggggcccagtggctcacgcctgtaatcccagcactttgggaagccaaggtgggtggatcacctgaggtcaggagttcgagaccagcctgggcaacatggtgaaaccctgtctctactaaaaatacaaaaaaaaatttagccaggcagggtggctcacgcctgtaatcccagaaactttgggaagctgaggcgggcagatcacgaggtcaggagatcgagaccatcctggctaacacggtgaaaccccgtctctactaaaaacacaaaaaaattagccgggcatagtggcgggcgcctgcagtcccagctactcaggaggctgaggcaggagaatggcatgaaccagggaggcagagcttgcagtgagctgagatcgcgccaccgcactccagcctgggagacagaacgagactccgtctcaaaaaaaaaaatttagctgggcatggtggcagacacctgtaatcccagctaatcaagaggctgaggcaagagaatcgattgaaactgggaggtggaggttgcggtaagccaagatcaggccattgcactccagcctgggcgacaagaggaagactcagtctcaaaaaaaaaaaagaaaaacaaagtacgtcctccacctctctgcagggctcctcagagtcctttcgccttagaccacttgggggcaggcaagcaagagacctgggtttgaatcgctgctctgccatttaacaggggtgttggccgggcacggtggctcacgcctgtaatcccagcacttcgggaggccgaggcgggcggatcatgaggtcaggggatcaagaccatcctggctaacacggtgaaaccccatctctactaaaagtacaaaaaattagccaggcgtggtggcgggcgcctgtattcccagctactcaggaggctgaggcaggagaatggcatgaacccaggaggcgaagcttgcagtgagccgagactgcgccactgcactccagcctgggagacagagcgagactctgtctcaaaaaaaaaaaaaaaaaaaaacaggggtgttgggcaagtctcaaaacctcccttccccttctctactaattgggggccacagtaggtaccatcattgagtgcggtcactgttgtccgtcccctgagcacctcccagttctgacttctgacctgagagatgttatgctggatgcaaacacccgcatctcacagcacaggatgtagaggccatcgggggaggaggactcgcctgagatctcacaaatgccaactggaacctaagctgggtcccggtctcccaaccagtgacactctgcccgagatgtggttcttggtctcttgtgtgtcaagacacccctgctctcccacctcagcctcagttcccttcagcaggttccttcaggccctgctgaaacgtctgcatgacctcccacaaggcaacgtgacagctaaaaaccaaaccctggccggacgtgggggctcacgcctgtaatcccagcactttgggaggccgaggcgggtggaccacttgaggtcaggagttccagaccagcttgaccaacatggtgaaaccctgtctctactacaaatacaaaaaagtagccgagcatggtgggcacctgtaatctgagctacttggaggctgaggcaggagaatcacttgagcccggggaggcagaggttgcagtgagcctagatggcgccactgcactccagtctgggtgacagagcgagactctgtctcaaacaaatgaaccccaacatagctgttggtggcaaggcctttctccatgaccaagggacggtggccattctctccaagtttcttcatctgtaaaatgggtacaattcagtggccctccctaacagggctggctaggtacacatggccaccagccctacttgctgtgtgacctcggccactaatgttcacatccctcagggtccccaatgagttggaagcccaaagcgcagggtcttaacagcaaagggcagagcaggcaggagaagcaggaagcctcgggtcaaagctctgaaagtgagggagtccaaggtcagactatctctgcacagtctccttaaaaggctgtgtgatgtcaagccagttgctcaacctctctgaaccttagatttcctcaaagtagggagtaggatgttgggaggaggaggagaagcgaacttcagggagatacttggaaaatcccagtcctggaggcagacctcttgggttagatcccacctgtgccaacttcctcctggtactgggtccatcagcttgtcctgggcctcagcatcccccgatccaccaaaagagaaaagcttacactgtaagccaagcactgctctgtaaacataaactctcttaatcgtcacaactttatggggcaagtttttcgactgttctccccattttatacggacaggcaaaccaaggaccaaaaggttaaaaagtttactaagtttctgtctcttccttcctgctttgggctggggctgtgccctttccacctcgaaatctctccttcccaaaaggcaagggggcattagctagttccaaacgcagatcaaagaccccaagacccctccccaacctggacatcagccggccccgcgccaaggcgcgtctagggggcgctcgctgcgcgccagatgtgcgggccgctctcagacacccgctctctgctccctccaacaaggggaggagctagggacagagggaggagagaaaggcgggggtgtaggggggaagcgaaccaggccccgcccagcccgccaggccccggcgggggaagaaggaggcggagagccgagctggcgtaacgagactttactgaaaacagaaaaccgggcgaaccaaggattacaaacaggaatgtggactcgtagcaaaacaaaacaaaacagaacaaaaaagggaggggggaccggtcgaaagaaccgaaggggggagcgagatcgaggaaaggggcggagaatttttttttcttcttcccatttctttaaaaaaccaacacaagaaaacacacacacacacaaccaacgtttgttcccgagtagaaacataaatagggcagaatcgaacactctgttcttctctcttccaaagaaaaaaaaaaaaaagtaaaagtaaaggaaaggcagggtttgaggctgcgccccctcggagcccccttccgcggcgcggtgtacaaaggggcagccgagacgcgcgggtttgtgcaacacggggcggccgcgcgggggaaagaggcagcgcgagggcgggggggtcatgcgctcgcccccccgggagcagggggtccagcttgtcgagtcctgggcaccctcggggggggggaatccccgggggccgcgccctctctgagttcctgggcacactcggggagggggggtccccagggccgcaccctctccaagtccggggcgcccacgacacccccccgcgagcccgccccttggggagggtggccgcgcatgcgccccgcgcgcggactcagtacgcgggcacctggtgctggggcagcagctggcagccgctgttgacgtggctgaggactttctgcttgagctgcgccacctgctcgcgcagcaggctcgccgtggacgccagctccgtgttctgactcttgagggtcttcactttctcttccaggcgcgagatgcgctccagcttgcgcttgcggcacttggaggcggcgatgcggttgcgcagccgcttgcgctccgccttgatgcgctcctgcgtgtccatgtcgatgggcgacaacggcgggctctcgccgaagctcggcacgtcgggcaccgtctgtggctcgtccttgagcgcagccaggcgcggcggccccaacgcgcctgggggtggcggcggcgggaagggcacaggttcggcagcgaaggcgaccgtcgcggcgccccccgcgcccccggcgccgcccgcgtagctgctcaggttcgcgtagacaggcgcttcgggcgcggccgccgccggggccagctcgccggggggcgcggagcccgtggccgtgcccgagggccccccggcggcggcggcggcggcggcagcggccgcgcccgcgccgagctggttctgcttgtgtaaatcctccagggccttgacgaagccctcggcgaactcctgctcctcgctggccgccaccttggggtagaggaactgtgagctcgtcggcgtggtggtgaccagcccgttggactggatgatgaggcgctcgagctcgggggaggccagcttcagcagccccaggtcgggagaggcgagcaggccgtcggggggtgccgcgctgggggcgccgtcggcgcgcaggggggtaggaggcggcgcggccgcaggcttgagcgctgccgccacctgctcactcaggctcagcgtcagcgcgtccttcttcatcatgctgccggccgcggccgtcgggggcgccccggggaacaagcggcccggggacgcgaagctgccgccgctgccactggcgccgccgcccaggccgctcagcgcctcatcgccgtagaagggtgtttccatcctccgcctcccccgccgcgccggcccgggggggagtggccgcggcctcccggggggcccgcgcccccccgtccgctcggccctgcgcccgccccggccgcggccgcagcgcccggccctccactggcggcggctcctgcgccgcgccacttgtgcgccctcttatagcctcggctcggcgcgatgagctcaccgcccccgttcgccattgggtgcgggtgacgtcgctcatttgcatggaggggcggggccaagccgccgacgcccgcccggccgccgttgccccggcgacgcgcggtaaacgccacaacagcgcgctgccttgtgggttgacgtcatgggggcggccgcgcgcccgggccgggtcaccccgccccgggaccgctgtgtacgaccgatctccccggcgccgcctccgccaaggcacgtcccgggtggcgtgatgggcccgggccaccaggcgcccgcccgccccgaggccccgccccgtgtccgcgcgtggggccccggccgggcgggggcgggggcgggggcggtgccggcctccggggactggagggggatggggtcccgcatggctaaataactccttggcgcctcctgctctgctgtgccgccagggcctcccctagcgcgccttctggagaggctttgtgcggatacggggctggaggcctggtggggctgtgtccgggggctcgccgggggtgtggggaggtctgcgttcctcaccctccctccttccttccctccctccctccaccccgcgtgtgattgctcaggaagagacgggaggggagaggagggtcgccagaagttgctgaaagcgcttggatcctgatcattttcactgagtgcgttctagaaccaggagtcctacttcctgcctttacagatgggaaactgggctcagagaggtggagtgaccatcccccgagagttagctaggagtcacagcagggcccgggctgtgactaggcctgagctcttgtccacccttagaaccctagaacctgggagtccaggcccctgcgcagccccttccttccgccgcccacgttttaaccccaggtctgccagggctgtgatgtcctgggcgagggtgcccaactccaggggctgggctgatgaggcaggaatgccgggtataattattacatgcttgttaccactatcatggctgttagggcttaatgagccactattaagactggctgggaagggggtgtgagggaggagagatggacccaccccaccaatactcacaagggatccttaggacatctggatctgacctacagcctctgcatgcacccctccagctccccacctctgtctgaatggagcccacaccctcctttccctgacctccttcccctcactctctctgatccttggcctcccagttgcaggactaatcgtacctctgggcctttgcacgtgctatgctctctgcttggtactcccttcccccagtgcaaagatgtgtcttcaggaagtgccccaccctcagactttactcctttattgtagcctctgaatctgccagaatgatggagtggaccatagtccctgaaggtcagggacattgcctatgctgagcctgctgacagggcctcgcatagaatggatgctcagtattaaaggtgaatgcggggctgggtgtggtggctcatgcctgtaatcccagcactttgggaggccgaggcaggcagatcacttgaggtcagcagttcaagaccagactggccgaaatacaaaaatacaaaaaaaaaaaaaaatacgaaaattaaccgggtgtggtggtgtgcacctgtaatcccagctactcaggaggctgagacatgagaatcgcttgaacccgggaggcagaggttgcagtgagctgagattgtgccactgcactccagcctgggagacagagtgagactccagtctcaaaaaaaaataaaaaataaaggtgaatgcaacaaaaggttgcttgtgtgggtggtctctagcctcagtttgtctgcctggccagtgggcatgcgttactccttttctatcctccttactcacctggctctgcccccaactggggcatgaaggccataagggaggctgtcctcatcaccaagagaggtggcctgtcggccacacgcggtgactcctgcctgtaatcccagcactttggaagtctgaggcaggcatttgaggtcaggagtttgagaccagcctgaccatcatggtgaaaccccatctctattgaaaataaaaattaggctgggcgcagaggctcacgcctgtcatcccagcactttaggaggccaaggcaggctgatcacgaggtcaggagatcaagaccatcctggttaacacggtgaaaccctgtctctactgaaaaataaaaaaaaaaattagccgggcatggtggcgggcgcctgtagtccccagctactcgggaggctgaggcaggagaatggcatgaacccgggaggcagagcttgcagtgagccgagatcacaccactacactccagcctgggcaacagagcgagactccgtctcaaaaaaaaaaaagaaaaaagaaaagaaaaaaaaattagccaggtgtggtggcaggtgcctgtaatcccagctagtcgggaggctgaggcaggagaatcgcttgaacccgggaggtggaggttgcagtgagccgagattgcgccattgcactccagcctgggctacagagtgagacactgtctcaaaaaaaaaaaagaagaaaaaaaaaataggctgggcgaggtggctcacacctgtaataagcactttgggaggctgaggcgggcaagtcatctgaggtcaggagttcgagaccagcctggccaatatggcaaaaccctgtctctactaaaaatacaaaaattagccaggcatggggagcgcaccggtaatcccagctgctctggagaaaggagaatcacttgaacccaggagatggaggttgcagtgagctgaaatcatgccactacactccagcctgggcaacagggcaagactccatcttaaaaataataataataataataataataataataataataataataaagacctggcctggcaggcctgggattcaaattgccagggcagggaactggaggtgtgggtttgttttgtctctagattggttaggaaggtgtctgtctgcctattggagtgtgtgtctgtgtgtgcacctgtgtctgtctgtattcgtgttgtatagacagacgcaggtacacacagatacatactcagatccatgggtctctgtgctctctagcccaggttctatcctggacaaagagatccctagtgggacaagatccagcccgcagacctgtagccagccctgccctgggaacccctctctgggtcccgtgcagtggggccagagtggaggagacggggtcatgcctctccctgaggcaggaggtgagtgggcggcctacagaggccctgccctgaacttgggcctcagccttggcagctggggagatggtctggtgaatggtaggctgagacagcctgagctgagtggagcactttcctgcaggcaggcaggtgagatacagaggcctgtcaacctctctgagcctcagcttttccttcatgaaaattgagcaaataaacctacctactttgtggagtatcgcgatttttttttttgaaatgaaaggcctcacatatttattactgaacccagccaacccacacgttcataacagattcagagaggaaaacacgtcgaactctccagatagtggtgacactttcagtttgatatgctaacgtgatcgtgaccttcagacagcataaatatgtgtgccatctcatgtgcaattccttatagacccagcttggttcttctccagtgtccttttggagttgtacctgattttatttccagttttcatccaaatccactggggaatgggacgattttgcttttgtttcttgtccaggaatcgcttaatcctgaaagtcttgtaggaagatatggcgagaagtggagtcaagaacacaccacgatggtgcagaaaggaaaagcattgcgatttttattggatttgaagaaatagtaaggggtcaggctgggtgtggtggcgcacgcctgtaatctcagcactttgggaggctgaggcaggtggatcacgaggtcaggcgttcgagaccagcctggccaacatagtgaaaccttgtctctactaaaaatacaaaaattctcccggtgtggtggcgcacgcctttagtcccagctacttgggaggctgaggcaggagaatcacttgaacccaggaggaggaggttgcagtgagccgagatcgcgccactgcactccagcctgggcaacagagtgagactccaactcaaaaaaaaaaaaaaaagaaagaaaaaacaaatagtaaggggtcaataaatgctttctatgattgtattatttgcccaaatgtaactgcagttctttggttttgagttctctcagcttggaatacccttacactcttggcgaactcctactcatccttcaaaacccaccaccttctccaagaaacccttcctgaccatgtcccctaggaccgtcgtcaatcctctccatctggctaagacctgtctgtcccttatctgtgtcttgttctgtctcctccatagaaggggaggggaggtcttcaggactggatggggaaggcctctcctggcccctaagtgtgggaagctgcctttgccacccccaagggctcctttcttcttttttttgagatggagtctcgctctgtcgcccaggctggagtgcagtggcttgatcttggctcactgcaaccttcccctcctgggttcaagcgattctcctgcctcagcctccctaaatagctgggattacaggcatgtgccaacacgcccggctaattttttgtatttttagtagagacggggtttcacgatgttggtcaggctggccttgagcctgacctcatgatctgcccgcctcagcctcccaaagtgctgggattacaggcttgagtcactgcgcctggcctccctttttctttctcttcgcattttctgttgctccacctcaatgccctttcctaccctctccttcctcctcccagccagagagccctctgggacaccccattcctgtccttccatttatcccagccctgacaccacagcagctgttggtccagctctgttttcccagagtgggggttcctccggggcagatctgaagccactttggacatatggggcggagggtgtctctaacgccatcagctagtcccatacaatgaactagagagaactttcattcattcaatccacatacactgattgagcccctactgtaagccaggggaaagggcacacatgaacaagaccaacatctgcacctttgtaggtccccacaccaagggagagccagaccggcgcagttttcaggagaatcaatggtgtccccgccatagatggtagtggagggggctgatattttagagtttgggtaatctgggaggggtggcccaggatgtaacaccaagtgacagacaagctggacttaattgccaattattgggggatcagagggttccggtaataggaacagccagttcaaaggccccggggcaggaaccagttggacacatttctagaaggtggggaggcaggtgggactggattgggaagccagtgagtgccaaaggaagagaaggggagtgccgaagcctccacctctgctcaggagggatttacccccaaggcaatgaaagttgcagatgaggttggggcaacactagggcttggtccgggactctgcattttcacctttatctcagcagcagctccacgagtggtgagggacgttatcccacttctcagggcagtgtctggagggggcgcgcgacgtgcccagagtcgtacaggccaggccagagagaaccctgccctccaagcagaagccgaacctgacgccccgcagccgccggggtttgaatcgctgcggctgtagtccttccccagcgcagagatttattgtttaaagcaacctgcaggccgggcacagtggctcagggcagtaatcccagcactttgggaggccaaggagggagggtcgcttgagcccaggagtttgagaccagcctgagcaatctagtgagacctcttctctacaaaaataaaaaagttcgctgggcatggtggtacacgcctgtggtcccagctacttgggagggtgaggtgggagaatcgcttgggcccgggtaagttgaggctgcagtttaatttttagtctttatttgaacacccagaaaccaaaaatcacgttgataaatcggaaagccccaaagaaaaccgagttaagcaggcagccgaaggggtgaggtggagccaggcactcacgaccccacagcggggaggtggggcttgtgaggaccctaatccagcgcttaggacccttaggctcgcagaggcgggacttgcagggaaagtgccccgactgccggacccccgcagggcggtcgggagtggggcgccagactcgggctgggggcgctgtctggcccgcacattcctgaggatcaagttacccgagaaggctgaggcctctctgttcccctcctgccaggcttccgccctctccaggagcaggaaccgcagtctgtccccagtccagcgcaggtgtctgcccagcctctcggaggggacccaggccctgccctctggactggcaccggatccctcctgcctcataaaaccattttacagatgaggaaactgaggcacagccccccttcagcattgatggaaccagattgaacctggctctgccagctttatgaccatttttactaactgggcaggcctagaagaatggttcagtcaagtgtttgttgattgactgaccatctagaatcagtctccaaagcctcttattatagcacaaggagaaaagaacttcccataccacttaccctcctaccccaccctaggacagacaggacccctgcacttatccagcatgcatttaatgtgcacttcctgtatgcccaggcctgggttaggccgtttcacaggtagatactggagaaccagagggtttggggatcagaaggtagtgaatttgctttctttagaccaacttcagaaattggtttgggccaggcaaaatggctcacccctgcaatcctagcactttgggaggccgaggcaggaggactgcttgaggccaagcattcaagaccaacctggccaacataacatgacgatacccccgtctccaaaaaaaaaaaaaaaaaaagaggccaggcaccgtaactcatgcctgcaatcccagcactttgggagtctgaggcgggcggatcatgaggtcaggagatcgagaccatcctggctaacacggtgaaaacctgtctctactaaaaatacaaaaaaaaaattagccaggcgtggtgggcaggtacctgtagtcccagctactggggaggctgaggcaggagaatggtgtgaacccgggaggcggagcttgcagtgagccaagatcgcaccactgaactccagcctgggtgacagagtgagactctgtctcaaaaaaaaaaaaaaaaaaaaaaaaaagataaattggtttgtagtctgagcagggtggctcatgcttataatcccagctctttgagaggcagagacaggaggatctcctgagcccagaagttcaagagcagcctgggcaacatagcaagaacccatctctacaaaaagatagaaaaattagctggttgggaggctgaggcgggcggatcacaaggtgaggagatcgagaccagcctggccaacatggtgaaaccccatctctactaaaaatagaaaaattagccgggtgtggtggcgcatgcctgtaatcccagctactcaggaggctgaggcaggagaatcgcttgaacctgggaggcagagattgcagtgagctgagatcgtgccactgcactccagcctgggcaacagagcgagaccctgtctcaaaaaaaaaaaaagctggtttggttttttgtttcttggttgttttgggccaaactcacataccatcattcatcgattcaaccatgcttttttttttttttttttttttggagacaaagtgtcactctgtctctgaggctggtgtgcagtggcacgttctcagctcactgcaatctctgcctcccaggttcaagcaattctagtgcctcagccaccagagtagctgggattacaggcacatgccaccacaccaactaatttttgtatttttagtagagatggggtttctccatgttgaccaggctggtcttgaactcctcacctcaagtgatccgcctgcctcaacctccaaaagttctgggattataggcatgagccactgcgcccgacgaccatgctctattgagtgcccgctgtgtgctgggcaggtgggttctcaccgcccagaggtgatgttctgggggactggaagcaaggtcattttagagaagcatgctgtaggttggtctcacgattttcctttaagttggcccccttttctgtttttacttcagtaaatacattttaaaagggaaccttcatgtcaccaccaagaatggaaaaccagtttctcttgctataaatagaaggaaaccaaaaaactatgaaatgagagcaaagtcaggcattcccacctcaggaacactcagggctggggctggacttcgaatgtctgagtcttatcaaaggcagggaagccccaagcagaagggcaggaggggccacagggacccacttggcagatgctccagtcccgtgggtcccagcacacagtaggtgcttgatgaatgtgtgttgatctgttaacatgcaacccattattgtaggtgcccccccccaccatgatgtgtgggttttgcctgcatccgaccacatactcgtggcttttccaggtactgagccatttccccgctgacagactgagggcagggtggtgcctgaatggggaggggtgggggaggtggcaggcagctgcctcttgggcaggggaccccacaggggcctctctggggaggcttcggtttggtttggtgacatgccaggatgcagctctgggcaaacgtttatttgcagccttggggctgtccccacccacggtcctgtgggcccctgacgtctgtccacactgagatgtgggcccctgtggcccgccgccctccctggctgtctgtggtgtgtgaatcaatgaatgagtgaatgagtaaaggaatgaatgcaataagtagcataatggatgagttcgtagaataatgaatggatgagtgaattaatgaatgagtggaagtattcatgctgccaagatgggaaacccattctccaggtattctttttttttttttttaagacacagtcttgctctgtcgcccaggctggagtgcaatggcactatctcggctcactgcagcctccacctcctgggttcaagtgattctcctgcctcagcctcctgagtagctgggattacaggcgtgcgccaccacgcccggctaatttttgtatttttgtagagacgggatttcaccatgttggccaggctggtctggaactcctgacctcaagtaatccgtccgcctcggcctcccagagtgctgggattacaggcgtgagccatctagatatgctttgtccccttttttcggatggacaaactgaggctgtcagccaagaaaggcttcagtatgtggaaggcagattcgaagccagttggccctgcacatcgtgggctgcatttctgcaccaagactgggggttcctggagcgagcttaggggtccggactggtgcagacggggcgctggacctggcccccagccagcggaagggatctgggccccagatggggagtagatggaactggaggcaaggcaggcggcagggggtgaagaggccgctgccccaggctgcggggatggggaggcaccggcagggtccgcgttgattcagaaaggaccccaaggaaggagcaactttgggggaccccaaagttgtctgagtggtatcaaaggccgtgcacatggggcccttaagcgctacagcaggggcaatagtggagagaccccacgccttcccgcctcccgctgcccccgcatccccttcctcccgcctcccgcctcccccctgctcctcgcctctcgctctcccggggaggaagtggcgagaatgcgggggtgggcaccctattctcacttcccctggggaagggcggggcctgcggggtcctctccgccgccgggagacggcatctccgcgtacaggggtgggggcggggagccctaggagctgggcaggcgctgctcagtccctggccaggtgacgtccgtaagtttcctggtcttcgatggttctcgaatgaaaaatggggggaaagacattgagttggaaacagcgagttgttggggagagaggaccccaccccgggccggtactagcagccagacacggacacgccctgccccggaggggtcagggccaggccgaagggagggaagtcgcagtaaacacagggttgggttggggcgggaggcgcattccaggcggagggaacggcgcgggcagaggcctggaggctggtggaggcctcctgcctcgcctagctgcggggtcctcagcgtgtggcccctcccctaatgggagggggggagaaaggatccggggggagaggtctcggagctgtcggcggcagtggaagagttaacttcccggggctgccggaccccgccgcgagctggcgggtggcgtcagcgccaacgtcagggcgaagtggtgccgcgtagacgcggacgcttcggccgcccggcccccaccccacgcggcgctggaggccgcggggatgggggcgggggcggtcggccctgcaagcaatttactgggctctgtgcagagagggaaattgaggcacgggaacggccgtggcctggctggtgctaagcccgctagcccgcgtcccacactaccgccccctcccagctcctccaggtcgccggacgacctggagctggtttgggcttgttttccattgcgcaaatacctgcgaataaacgtttgccccgagctgcgacttggcacatcaccacctctgcatggcctcagtttcctcaaccggataatggggagagttgacatttagtgtgggcgctgggttcggccttgaaaagggggtgtgggaggggactgcaccccaagaaagaggctggagcggggacacctgcgaggctgtctgtgaattccgggctggttctccagccccctcctctcctcccgtcgctcactcccctcctctccctccccttcctgcttcagcttcccctcccctcttccttatccccttctccctcccgtctcccccgatctcctctccaccccctctctccctttcccccgcccgcccagcgaggccgccccaccggactgctaattaaatgcagagctggggggaagggacggcgcgtggttaaccccttccccgccggggccctgaaccggggatggggaagggtgtccgccaccggaatttcctcccccccaggggcaggccttaagctctaggacaagcccatttattgagtgggtatatcgaggccaaaggaacggccccaacgttctgggtgaggctgtactaaatcgggcctcctgattggagggccagagcttcgagatagcggaagagaaaagcaatatcgtggcttggaaataaaccaagagaaaaaaaaatgagttggaaggagagacagcgggagagggaggctggaaaaaaatctaggagcaagacagagacagagagacaaccaggtaagggaggtggagctccgggtgtggcctggaggcacccaggcaggctcccggtaggaggcggcttcctggaggaacctgtggtggaataactcctggccctggtgttagcctccaggcctggctcacgcactgactgctgacttctgatagggccttgtggcctgaaaggaaggtcatgcctgcctttggagccatcggtcaacccaagtccccgccctgtccctgaaaacatcagagaggagcccagcgaagcgaagtgtgggctatgtgctgtgaggtgactcagtggcccctcattcttgggacgggaacaactgaaagaagtgaatgatataaagtcaggtggtgagaaagcaaatgacagcaggcggagggagtgtggggtggggggggccagaggatccatgataccagcagcagggccaccatgaggatgccccagggaagggtgttcctgaaagctggagtagcacgtgcaaaggccctggggaggaatttgaggtatttgtttgtttgttttttgagaggagtctccctctgtcccccaggctggagtacagtggtgcgatctcagctcactgcaacctccacctaccaggttcacgcgattcttctgcctcagcctcccgagtagctggaattacaggcgtgcgccacgatgcccagctaattttgtatttttagtagacagggtttcaccatattggccaggatggtctccacctcttgatctcgtgattcgtccgcctcagcctcctaaagtgttgggattacaggcgtaagccactgtacccgggctgaatttgaggtgtgttaagggaacatccaggaggaggcgtggcgcagggtgaggagagatggaggattacaggggcctccagatcctaagcagggagggtggggggtggcttgagtccttggccagcccaggtggagcctgtgactgctctccctgcctcacttttcctaccattatgcatgctccagaagcagcaggggaggctttggggatgtggaggttgcccagggtcacagggacccctgttgtgccctccgtcagtgcccctctggcctccccacaccctctgtggctccctgctgtggccagtcttccccatcatcgcccctggctctcttctctcctgcagtccagccactcagcccttgtacatgtccctcatctgttctcacaatgcccaccccaggtgacaacatcctcccaagcccccttcaggagatggtggggctgacactaacaggggagggggtgtagggaaggtgagcaccctggcccctgagtgctgcacacaaactgtgtaaaaatagctgctccccctgccccctgtgaggaggcggctgtgacggtggtggctgcagtgacggggatgtgcccagagaagcatccggcagggccagttgccatggtgatgctgactcagcggcagaggcaggtagcagcatctggtacccggccggcacgcctctgcttggcctacgctcatagcaccctgtccagccccaactttccagcctccaccctgggggtgtcttctgaggctgcagaggggtgggtgagacctcgggaaggactggacaagttcctccaccagacaccactcagtcatctgctggaaggtgggagacgctgcttctcatggagcggacctcagtgtcaggtcttcctccctctatcagccatccgcccatctacctactcacccatccatccactcatccaccatccactcatcccccatccatccaccatccacccatccatctaccatctgcccatctaccatccatccacccacctgtccatctatccacccatccaccatccactcatcccccatccatcatccaccaatcagtccatcatccacccatccatccaccatctacccattcatccatccatccattcctccacccagcggccatccatccatgcaccatctacccatccaccatctgcccatccaccatccatccatctacccaccatccatccatctacccacccacccatgcatccaccatccacccattcaccatccacccatccaccatccgtccaccgtccacccatccaccacctaaccatccaccagccatccatccacctgtctacccactgacccatccatccaccatccactcacccacccatccacccatccatccacccatccacctatctacccacccacccatgtatccaccatccacccattcaccatccacccatccatccaccatctacccatccaccatccatccaccatccacctaccatctacccatccaccatccatccaccatccactcatccatctaccatctacccatccaccatccatccaccatccactcatccatctaccatctacccatccaccatccatccatccatccacctatctacccaccaatccatccatccaccatccactcatccacccatccatccaccatccacccatccacctatctacccacccacccatccatccacccatccatccacccatccacctatccaccatccacccatccgtccaccatccacccttccatccaccaatccacctattcatccagccacccatccacttaccacacacccacccatccatccattcctgtgttcatccattcactcaacatttttggagcacttaccgtgtactgacatccttctgggcacatggtggttgccactgtcgatgcaggcagggtatcagcagtctggggtgcagggacttgggtgaggacaaggcctccttggctacttggagccaggccttgagatgctgaggccctatctcttccttgttctcctagtcttgctccctctctcttcctgcatctctcaatctctctgttttcccatctgagtccatcttagatccttccccatatccccaggccccccagcagctgccgtctattcccctcttcttctccccactcacttgttccatgccagctttcccttgggtacagctatgtattcccacctcggggtctttgcacatgctgttcccactgtctgggagactcactcacctggaattgatcatatttaattcttggctggctttctttctttctttctctctctctctctttttttttttgagatggagtctcactctgttgcccaggatggagtgcagtgacgcagtcacagctcactgccccctccatctcccgggttcaagcgattcacctgcctcagcgtcccgagtagctgggattacaggcacacggcaccacaccctgctaatttttgtatttttagtagaaacggggtttcaccatgttggccaggctggtcttgaactcctgacctcaggtgatctgcccaccttggcctcccaaagtgctctgggtttaccatatttaattcttgccttccttaatgtctgcctctatccccatccccagagtataaaggccaaagagctgacctgtggttctttcagggacctatttgtgccttcatatctccaactacgaaatgggtaaatggacatggtgctagcaggatgacctcataactggggcaggggttgggaggaagcccttagacctgtgcccactgcagattaaacactcagtaaactcccttccttggaaacagcccaaatgtccatcagctgatgaaggatcaacaaaatgtggtccacccacacaatggaatatgatgcagccacaaaaaggcatgaagcaggccgggcacagtggctcatgcctgtaatcccagcactttgggaggccgaggcgggcagatcatgaggtcgggagttcaagaccagcctggccaacatagtgaaaccccgtctctactaaaaatacaaaaattagctgggtgtggtggcacacatctgtagtcccagctactcagaaggctgaggcaggagaatcgcttgacccgggaggcagaggttgcagtgagctgagatcgcaccattgcactccagcatgggtgacagcataagacttaagactccatctccaaaaaaaaaggcatgaagcactagtctgtgctaccacgtgcacaaaactcgaaaacacgatgctgagtgagagaagccaggcatgaaaggccacacagtgtgagattccattgatatgaaatgtccaggacaggcaaatccacagagacaggaagcagcttcctggttgccaggggcttgggggaagggaatggggagtaactgctgatggggaccaggtctcctttggaagggatgaacatgttctagaattagaggcgatggttgcacaacagtgtgtgtgtattaaatgcccctgaattatacactttaaagtggttcattttatgttatgtgactcctgccttactttattttaattttttgagacagggtttcactctcttgcccaggctggagtgcagtggcatgatcttggctcactgcaacctccgcctcctgggatcaagcagttctcctgcctcagcctcccaagtagctgagattacaggtgtgcaccaccacaaccagctgatttttgtattttagtagagacgtggtttcaccaggctggtcttgaactcctggcctcaagccatatgcccacctcagcctcccaaagtcatggctcccatgagccaccgcgcctggccttcaatttattttttagagacaaggtcttcctctgtcgttcaggcagaggtcaaaccgtgcagtggttcaatcttggttcactgcagcctggtctccagggctcaaccaatcctcccacctcagcctcctgagcagctggtacttacaggggccacgccaccatgccaggccaattttgtttattttttgtagagatgaggtttcactatgttgcctaggctgctctcgaatccactttcctggattcaagcgatcctcctgccttggcctcccaaagttctgggattataggcgtgagccaccaccatgccaggcacctcaatttttttttttttttttttttggagacagagtttcactctttttgcccaggctggagtgcaatcgtgcgatctccgctcactgcaacctctgcctcctgggttcaagcaattcttcttcctcagactcctgagtagctgagattacaggtatgtgccaccacacctggctaattttgtatttttaatagagacggggtttctccatgttggtcaggctggtctggtctcgaactcctgactgcaggtgatccgccggcctcggcctcccaaagtgctgggattataggcgtgagccaccgcacccaaccacctcagttttttttgttaagtacagtacattaggtaaaaacgaaggaaatctgaataaagtagggaatttagtcattacaaacaaaacaaaactgcttcttaagtggttcagggaggttggttctctgaaggtgtctctaggttgactcatcctctctaagggaaaacagagggccagggaggccctcacatctacagtgtgccagcccttgcccggtacccttacccttgctttttgtttttttttgagatggagtttcacgttgtcactcaggctagtgtgcagtgccatgatctcggctgactgcaacctctgcttcctgggttcaagtgattctactgcctcagcctcccaagtagcttggactacaggcatacacagccacgcccggctaatttttgtatttttagtagagacggggtttcgccatgttgtggccaggctggactcgaactcctgacctcaggtgatccgcctgcctcggcctctcaaagtgctgagattacaggcgtgagccactgtgccctgctccctcgccctcactttgctcgccagccagctgactgccttttcaacacacccagcacacactttcttcagtgccttgacacctgccattctctctaattggaagcctcaggtgatcgagaaacgctggattccaccccagcaggtggaaccgaggtacagttctgtgtgctctgttatccccaccttccttaggccaccagaaaggtcaaggtgcttggtggttaggacaaagttgaccgcaccttggggccacagaggccgttgaatatgaccagggaggctgacagcctgagatgacagcagggtgtgagggtatcttggagggcacagtgcacacccctctcccaccctgggagggagaggaccctataagttaagtggggtctcgaagccagtgggagggtgaggaggtggaattcagaccagctgggggctctgtcaaaagggcctgcttctggctgcctcaacaatgcaaacggcaagaactttttttttttggtggggggggggtcttgctttgtcacccaggctggagtgcagtggcgcaatcatggctcactgtagcctcaacctccctactcaagtgatcctcccccttcagcctcctcagcagctgggactacaggtgtgtaccgccgtgcttggctaatttcatttgttttgtagaggtagggtctcactatgttgcccagactgggatcctgggctccagccatccgcccgccttggcgtcccaaagtattgggattacaggcttgagctactgtgcccggccaagaaccatttttaaatctaattaatttttttttttttgagatgaagttttgctcttcttacccaggctggagtgcagtggcgagatctcagctcactgcaacctctgcctcccgggttaaagcaattctcgtgcctcagcctcctgagtagctgggattacaggtgcctgccaccacacccggttaatttttttgtttgtttgttttggtttttttgagacagagtctcactctgttgccaggctggagtgcagtggtgtgacctcggctcattgcaacctctgcctcccgggttcaagcaattcttctgcctcagcctcccgagtagctgggactacaggtgtgtgccaccaggcctggctaatttttgtatttttagtagagacggggtttcaccatgttagccaggatggtctccatctcttgacttcatgatccgcccgcctcggcctcccaaagtgctgggattacaggtgtgagccaccacgcccggccaatttttatattttttagtagagacggggtttcaccatgtttcccaggctggtgtcaaactcctgacttcaggtggtccacccacctcagcctcccaaagtgctgggattacaggcataagccactgcacctggcccatttttttaatttttaattttttttcccaagacagtcttgctctgtcacccaggctggagtgcagtggcatgatctcggctcactgcaacccccacctcccaggttaaagcaattctcctgcctcagcctcccgagtagatgggattactggcgctcaccaccatgcccgcctaatttctgtatttttagtagagactgggtttcaccgtgttagccaggctggtcttgaactcctgacctcgtgatccgcccgcctcagcctcccaaagtgctgggattacaggtgtgagccaccacccccagccatttttttaatgtttaaggaaaactgctgggcagtgaaggtctccccagacaatgtcactgagccccggcctccccaacctggtctgagatttcagggggtttcagaagaagctgacctttgagaaggctctggggccaggatgtctgagttacttgatgctggaggggtggggcaaggagggtctggccctggtggtgcagaggaggggagatgagggtggggaagacacttgaggacgtgaggagtatttttaggtgctgaatgcagccctgaaatatttccacggccactcccgagagcgagctgggtgactatttcggtgcctggttccagtggaggcggggcaggggtgagtcactcactgcccagtggccgcagaggccaggcccaggctgggaggcggctcgaagggcaggatcgcaggcctgcaaggtgaacggtcactggcctggggccaggcttcctaagccagcctccagggcacagaggacagcggcctttctattccccatggcactggccaatccagaggggccactgcctgggtgccctgggacaatgagctgctcacgccaaccccatagttgtaaagatggagggtcccccgtgaggttctggacaccccacaggtgctaggcgagatgccatcttagattatttcaagcatttattgagcacttgctgtataccaggccagtcctaaaatgattactggcatcctcccttcatgcaatctgcccaataacccccatgaggtagagctgctgttatccccccgaccagggaggaaactgaggcacggtagggttaagccctccaggcacctaactatgtgcctcaaatcctgtccctcagctgatgttacaatcaggggagtgagttttaaagcagcagccgatcttgcttaccccccacaccctattcccaaccaattttggggtcctgactgtgcctgagctgggagaaggtcaatggatccttcaggtttaaggaggcagtggaaagaggaggtcaccattgctgtgtgacctggggcaggttcctcaccctctctgtgcctgagcagtgaatgacgatgccaccctatgggtgagttccggagctgcctggcacacattcatgatagataaacaatggttggctgagcatactggctcaggcctgtaatcccagcactttgggaggctaaggtgggaggatcgtttgagcctaggagtttgagaccagcctggacaacatggtgagacccctatctgtaaaaaaaataaaaaacaattatcggctgttgcttggattgtgtgcctgtcctgagccttcatttctccatctgtgaggaccctcggaggtgctgggttggaagtggctttggaaacccacggggctgagcggcaaggctgagtgggagctcggggaatcctcgccctcactcgaagtctccttgagaagaggctgatgcttggccgggcgagatggcttacgcctgtaatcccagcactttgggaggccgaggcgggcggattgcccgaggtcaggagttcgagaccagcctagccaacatggcgaaatcctgtctctactaaaaaatgcaaaaattagctgggcgtggtggcggacgcctgtaatcccagctattcgggaggctgaggcaggagaattgcttgaacctgagagacagaggtttcagtaagtggagatcgcgccactgccctccggccagggcgacagagtgagactttgtctcaaaaaaaaaaaaaaaaaaaagaagtggctgatgccaagcgtcaggaacagatccctgcaagtgcccaccccagctcctgtaggggcttcttttttattttattttattttattttttcttttgagacggagtcttgctctgtcgcccaggctggagtgcagtggcgtgatctccgatcactgcaagctccgcctccctggttcgcggcattctcctgcctcagcctcccaagtagctgggaccacaggcgcccacccgccttgccttcccaaagtgctgggattacaggcatgagccaccgcgcccggccctgtaggggcttctggcctgagccctgaccccctctgccccttccccacagaagttcagaggctccgtgcttgcagttcctccacctgttccggctctctctgtgtggccagcagcttcttgtccactcgagacttggtttgactggacctcctcttaaatttttaaaaaatttttaatttattattagtagtatcatttttttgagacagactctcgttctgtcgcccaggctggagtgcagtggcgctatcttggctcactgcaacctctgcctcctgggtttaagcaattctcctgcctcagcctcctgagtagctgggattacaggcaccacgtgccaccacacctggctaatttttgtattcttagtagaaataaggtttcacctcgttggccaggctggtctcaaactcctggcctcaggtgatccgcctgcctcgacctcccaaagtgttggaattacagttgccgctgtgagccacagcacccagccggcctcctcttgctctgtggaaaggaggtgccacctcggggtcctgcacttcctgggcaaggccagctggtcagcctaggccctggcagcctcctcctccctgccctgaggccccagcactgcccccttcctgcttccacccctgcttctgactgttccagaaccctctgtggctgcttctcatgtcactcagggcccacatcctccccatttcctgcccttctgtttgctcctgtgtcccctgggcacagggcctttgcacgggactgtcctcctgacccctgctggtccagaatgttctttcccaaggtggctggctccctcgtctctcaggcccttcctgaatcttcagtgtccttctctcaccttccctgaccacctcttcattcacctcctcacgagcccgccctgtttctggtttctttttcttttttttgagagtctcgatctgtcgcccaggctggagtgcagtggcgcgatctcagctcactgcaacctccgcctcccaggttcaagcgattctcctgcctcagccttctgagtagctgggattacaggtttgtgccatcacgtccggctaatttttgtatttttaatagagatggggtttcaccatgatggccaggttttgaactccttatctcaggtgatccgcccacttcggcctcccaaagtgctggggttacaggcatgagccactgcgcctggcctggtttcttctttttacagcatttatgcatttgatatgcatatgcttgtggctggctcactcctgtggaagggaaggattgccggggctgtgtcaccagcacctgggacaaggcaagtggccctagtgccaggctcgtgccaggccctgggctccaaaagaagaaggtggggagggaggtgacagggacacaggccatctgggggtggctgtcagagtagtgctgggaacagcaggtgaagcccagaggaggagaggaggaggagagagaggagggggatgggggatgggagtgggggatgagtggaggaggatggaggaggaggggaatggggaggaagatggggagtgagaggagggggatgggggaggagaaggagaaggaggaggaggaggaggagagagggatggcttcccacagctgcctctcgggggccactgcccaaggccagcctctgcacttttgtccctgaagcgggtgtttggctccaggatgaggtggcgtcagcagccgacccgggcctgtcgcactctggcgggggactgtgggctggccctgcagagctcagcccccggctgagtcacagcacagcgccaggcgtgggcctccctaacagaaagcaaactccaggcgagaaggtctgggggcgggtggggaccatctacgataaaggcagccccagttgggtgaggagggcacagaccatcggagggacagaaagacctggaagccttggatttaggaactagactggtgcttttggtttcttttcttgttgagggggctgaggatgaggctttgtgaaaccaaccaggaagaatgaaacacagagctggtccgacacccagctcgagggaggggggccggaagcttctggaagttggctgcccctaagcaggggccactctagcccacaaggccaagttggcagaggcagacgaggggactctgcggctcaagtcacgggccaggagcccgcagctgccgggctggaaaggtcagagccggctctgcgtctggctgcgccggcaagaagccacaattacgcaggcaaaagagcccggggattagccccagcacctgggaccctgaatggtgagaaggcacctagggggtgttggaacacattctgagttcagagcctggtcagggagaaaaaaccaaacggagatcaggaaggggaaggggccttcgagggctttcccatcccaacttcccaggatgcctgaccccagagctcctggatttgatccacgcctcgtgacacacacaacccctgggaggaaggagcccaggccccttggagagccccagaggcctctaagggccggtgagtctaggacatggggcaggagctgcaaatggggcctccctgctccccacccttccttccctcctcctctaaacattgccccacccacctcgccctgtgagcccagccccctgcacggcccacactgtaggggcatggggtgtgccaagagatgctcctgtcgaccaggcgcagtggctcatgcctgtaatcccagcactttgggaggccaaggcgggaggatcacttgagatcaggagttcaagaccagcctcgccaacatggtggaactgtgtctgtactaaaaatacaaaaattagccgtctgtgttggtgcacacctgtaatcccagctactcaggaggctaaggcaagagaatcgcttgaacacacgaggcagaggttgcagtgagccaagattgtgccactgcactccagcctgggcaacagagcgagactccgtctcaaaaaaaaaaaaaaaatgctcttgtccaacaggcaggtgggtgccgtgggccggtgcatcccaaggcttccaggcccgggcccccaactgctgcccctgcctgtgttgagggggcgggtttgtgaggttcagggcaggccacatcctggaccccacatgccccatctctaaccatcaatcaagtgccgctgtggcggagaggattcaggcgactgcagatatccatccctgtcccccaccccacacacaaggagaacatcccaggcgaggacattgtaaatgcaaaatctatacgatggcaagtaactctgaagactcaagaaaaagagttcctcacggacgggaccttttattccaatcacctctcaaaataggtctccgaacgaggaccctgaagagaaggctatgcagggggacgggccgctgcctggctcagggcttccctctggtttcttcacggtccacagatgctacccggagcctttctcgaaagcgctgactcagtgtctcaggtgcgcgcccgaggagtggcaaacccggcctggctcagaaagggggcaggagcctcgtgagaatcttccatgagcatcttccgaggggattcctgtcctgtcttctctgtgtgaacgccagtgtggacagatgaggatagatgatggagtccaggccacccaggagggggtgatggggaccatgcgtggcccctgcctgggacttccctccccacacaccccttggcattaacgtctccacagaggggagagggttataggacaacctggtgtggggggcgccggggactctcaagagcccccactgtccagatgctggtcttgccttttgtaaaaggacatcagtgcctcactgtgccgctgacacctggtgagaactctcaaaaggaagcttcccttacgggaacggggatttcctgagagtccagcgatggacagagggcaggagacccgctaggtgcacccagaagctcaaaaggaacagtggatgtgcagtgtgtagttttatttgtttttatttccataacacaagagaggaagcgaagggccagggcccgaggcatcccctgcacggttcgaaggctttcaaccgtcccgggtttgttttgaaggcaattttggggccgcgcccaaggaaaccctgcaggctgtcagtcccagcatgaacagcttaaaataaaaatctcccgtctggttgctgctcggagaggctccaagaaatgcaaaacaaacccgcctggaaaatgctgccctgagaaccagagcgagggcttgaaagatgccttcaacacagactcttctaggaatccagccagttttgggacggccgtttcacaaaaccaaaaaacaccaagtaacatttctaaccggagaattgccggttttagcaagaaaaaggggcttcacctaaaagggagggtcacaaaacacgaagggggttccccctggcgcctgcctcttcctttctgagcagatccgtccgagactgtggagcggaatcgccaccctggcaggagggggcgcagcagccggtctgggtgggcgctcactgtttgcccgcctgtctgccaggcttcttctctggctggcctctgcctgtgcccgggatcccacctcggccccggccaccaaacacacctagaggacagagagagggcgctgcagcagagccaggtgggtgggaccttcgacaggatcccggcgccctgaaactctaggccaggtcacctaagtctccagcctcagcttcctcatgtgtgaggtggtgactgagggtgcttggatctcctccgtggggcagagcatctgaggaaggcaggaactccagggcatcctcattatgggactagacccagcccccagggatgcgggggggggggactaggcgacagaggacactaagtcacattgggggttggggcaggcttcctaaaggacaaagccagaagggtttcctggaggaggaggaggaggtaggagaggcgtggagcagagaccagggcagtaggccaggctgggggctccctggcggggggggggcctcctatgcgccacaaccacccacagcccctcatctacctgccaggaggaaaacagaaagagggatttctgtgtatccagccccagggatggggaaggggaggggactccccagcaggcctgaggccagagatagaccatgaggacaaatgacattttccatgaagcccctgaggtgggagcatgtggccactggggaggtgacagggggttcccgggagatgagggccccagggactgagtggacgctacagcggcacctccagtaatcctgagcaggctgcacgcagggcacgcctgtccccacaccctctgtgtgcctggcgccccttcacgccaccctcaccacaggccaggcctggacgcagcaggttggtcaggccgggacccaacattgatccctccctctctgtctcccttggggaccccagctctgtaagccccgtttagggagccgtttcagagaactttctagctggacgaacgcttgaggaaatcaaagctggagcttcaaacagcaggagagccaaggccagcaagaggagctggccctgtggcccatgtgctgggtgccaggggccagaggccagcgctgcaggcagcatagctcaggccctccacagagcccgctgggaggctcagtcgtgggccagggaggtctggggacaggaggactgaccccaacaggaactggaatcacggtctactctgcagacctcaaccccgtgaaggtggggtcaggggtccagattcagaggatctaagaggtcagggctctcaccagccaggggccaccaggccctgtggggacagaggccagaggccaacgctggcctgggccaccaacctcccctctcaccaggcaggaccagctgtgctagggtgcacagcctggtgggggttactgcgaggctgctatctgcactccatggcccagtggcttcctgcagagcagccagagaaaaccccccacttccctaggtaggacccgacccactctctcaacaaccttgaccccaactactgggaaggagccaggccggggaccccagaggccccacccaccctgagatccccaaagctccctgcctggagtactatccctgcccctccctcgggctcactcctgaccacctcgtgagcctgcacagaattggcgcctggggccttccgggggcagccatgccgtgctgcaagcccccaggctggcacctgagcccagcacacaggcagtgcccatggatggcagaagcaaagcccaggtccccccgagaacacagagctggggacagagaggtgaggaagggcaggggctacagatggcccctgggcctaacaaatggaattttatgccaattcatcatctccggtgggggcgggcgaccttggctctggatagagccacgccaggttccaagtggagttgccagcggcctggacagatgggcaccaccataccctctcagaggggaaactgaggcttggggaggtgacttgatgtgccctgaggaccgccaggaggcgcagtgagaggagggctgagtcccaggtctcggggctcctctgcctgggcctcggctcatggccaaggaccaggaggggggcccgggagggttgggaggctccgaggcagcgctgcaagggcaaccccaagaaggagggatgccacgtgtggctgtcttcccgccccaggtacgtccactggagaggggagacccacctcggccagcgccgcccatgccgcggcctttctgctgcttctgctgctgcaggcctccgcggccgcggcccttggccaccacctcctccttgaccatgtcgatgatctcgtcggggatgcgcaggtacttgatggtgctgccgcggatgtagcactcgggcatccgccagaacttgtccccgtcctgcggagaaggggagcaggttattaacttaccaccgggccgtctggcccagccctgggagcgcgggaggccctgcagatcctgcccagcctgcaccccgtaccacccctgcaagctgcacagtatcagtcccgggacatacgtggcaaagggtccaccctgcaggcaggatctgtcctgaccccaggcaatccttcacccaggagcaagggtgggtgtggtaggcgcagcccccattgtgcactcacaaggaagactggctcctatcctctgcccgtgggcctggctcaggagtggctgactggggctccctccagcctgggatggggctctctctggttggggttcttcacctgcagcccaaagcccagagcgggtgggggcctccctgtgcaccagacacagccgaagcccagctactcctcctcctgccccagccccacctcacttctggaagcctctctacatgccctgactcattcattcatctaagtatctcctgacagggcctgcgctgggtgcagggacatgcgagcaagctacaggcctagtgtggtgggtgaagaggggcgggaaatggggggacttgggtcctgccagggtggctcaagggcggctcccagcgatgccagttttaggagagctaaccaagactggagaaatgggggccttgcaaagacacagactcatgctgcaatgcctccgaggcccccactgggacagatcgagggattagcaggggccagggccattcctaccatatcagtttcccagccccgccccaccgcccaggttcctggacagacccacgcacgacgcctggatggcctttgcccccgatgccctttaaagtcagatcacagtatgttccagcttggaacccacccagggccccctccagcctgggggcaaggtctaagaacctcagcagggctctctagggcccgagatcctgccccgccctggcggtcctctcccagcccgacgacactccctccagatggaactttctgtttccggaacacacgccatgggcttgcccccagaactttgcacgtggttttcccacttctcatctggctaactttgaccccaaaaggccttacctgcccgaatccccaagtcctcctgtcagacactctcctccacacctgggtaggtgtggcctggcctagcgctgggcggggaggaacagcccctttgggtgctcactctcccaggaacccctcgagggctcgtggggcggacacaccatggttctgtggggactcagggcctgggcaggtgacttggcgcccagctctcccaggcagggcccagaggcttcctcgtgcaggaacctgggcagggcctgagctcactgcagggaggcccctgcctcctgcccacagcgctccagaggtctctcagcccggggtctctgcatcctgcggcctgcctctgagggagggagggccccacttagatggggacgatgtgagttcccatcgcctctcctcccagccacatgtgacggcagcatcaccgcctggccacagaggcaggctgctcagggaaagccatccgtccactcgaagctggaggcagaggccaaaccaacccctggagaccacgcagcctctgaatcaacaggcttctcatgtctaggacctggaggtgtccacaagaccgcacatgctcacgcacgcaacacgcctggtgattccaataccggaagtggacagagccccgctggccgcagatgggaggcacgcggttctgcaccaaggcaccatccgacacagccagactggacccacccagacgccctccgacaggctatggcacgaaacccagcaagcagtttctagagcttctagcgctgctgcacagcagcctcaccacctgtccccaccccgcccagccctgtgctgatgagaggcccagtcccgggtgggggtggcggtcagggcaagatacggccacttcaggaagaagcgcctcccccctcgagccctgttgtcctgtcaaggtgaccccaggcaggcactccaagctccccagcagtttcctccctataccatggggggctgtcacccacagggagacaagacagatggggtcagggaaggttggtgggaggagtccaagggagccgctgccttcagcaccatccctggcctcctcctcagtgctctgtgggtcatcccaggggcagggaaggcccgtgacaccaggggaaccatcttccagccccggccgacccagcagcactcctagccaggcacttccggtcttgggctctggctggtggctcctgacccaccgggccctggcgctgctcctgcccaccgtgacctgggcatcccggacatcccagggccacactaccatggcccgcagagtgcaggcaacatccaggctggactaaaggcagcagagtccgggagtcttgggcctcccctggagggggctgccccagcctgagccacagggagtccccagtcctaggtccttccaggtcaggggtggcaccaacagacacacagcaggaaagtctcccacagggtcaaagtccagggcacactgggagacttggtggcctagctcaccctgccctgtccctcctgactgacccctggaaggacgagcagtcctaggcggcctcccccactgactcctcccatgaggcccagggagggagggaggaggctgagtgtgcaccccctgcatcccacccccgttggtgggtgcagcacccaccctggacgtgcagatgacttctcgcaggttaatgttcatccagttgtcgcagctcaccaggtgtccattgtacgtctccccatttttcagctccaccaactagaagagagacaggctagaggttggctgtagccctggagccctgcgccatgggcccctcaggaggtgtagctctgccctgagatggaccaccacctccgggcctcagcccacagttcccagacccctaaatggccttccttacaggcgacaggctctgcctccgctagacacttcgctggcagttagacagtctatcatgacgccaacctttgtgcaattaaaaaatgatactgggccgggcgcggtggctcacgcctgtaatcccagcactttgggaggccgaggcaggcagatcacgaggtcaaaagattgagaccatcctgaccaacatggtgaaaccccatctctactaaaatcataaaaattagctgggcatggtggtgcatgcctgtagtcccagctactcgggagcctgaggcaggagaactgtttgaacccaggaggcggaggttgcagtgagttgagatagggggaggttgcagtgagctgagatcgcaccactgcactccagcctgagcaacagagtgccacttggtcttaaaaaaacaaaaaactaagaaacacagaaatgtttaaaggaataagtgagacaatggtgatggtggccactgatccagggtggctgggggccaggtgggcacagctgggctggtcctggcaggcacccccacaacaccagatatttgggcttcagtgttccacaaatgctgttttttactgcaataattactcatctattttggtatgttttgagaacaaagataagtagcagatcattctgaggatatgctgctgttaggaaaagactgatattttttggtgtcttttatgagacagggtcttgctctgttgcccaggctggagtgcagtatcgtgatcatggctcactacagcctcaacctcctgggctcaagccatcctcccacctcagtttccctagtagctgagactataagcgcacactaccacatgtggttaatttcttttccttttgtagaagtggggtctcactgttgcccagactggtcccaaactcctgggctcaagtgatcctcctgtcttggcctcccggggtgctgggattataggcattagccaccacactcagtccaagcctgagattttcttttgagatggaagtttctctgttgttgctcagactggagtgcaatggtgtgatctcagctcactgcaacttctgcctcccgggttcaagtgattctcctgcctcaacctcccaagtagctgggattacaggcgcctgccatcacgcccagctaattttttagtagagacggggatttcaccatgttggccaggctggtcttgaactcctgacctcaggtgatccacccgccttggcctcccaccagggctgagatttttaaatgactcaacttaggcatctgcccaagagaaatgaacacaggcaaccatacaaaaatgtgtgcgtgaatgttcacagtgacactgttcgcaatagccaaaaaggggaaagagcccagatgcctatcagcagacaaacacataaacaaaatgtaggccgggcgtgagcctgtaatcccagcactttgggaggccgaggcgggcggatcacgaggtcatgagatcgagaccatcctggctaacacagtgaaaccccgtctctactaaaaaaaaaatacaaaaaaaattagccaggcgtggtggcgtgtacctgtagtcccagctcctcaggaggctgaggcaggaaaatggcgtgaaaccaggaggcggagcttgcagtgagcccagatcactccaggctgggcgacagagctagactccctctcaaaaaaaaaaaagtggtaagtatccgctccacggagtatcgtctggctataaggaatgaggcactgacacaggccacagggtggatgaacctcaaaaacacgttgctgagtgacaaccaccaggctcgaaaggcctcatggtctccgttcgcatgcatgggaaatatccggaataggcaaccccacagagacggcagctgcctcatgctcatcagggactggggctgggaagtgactgctgatggaaatgggctttccttttgtggagacggaaatgttccggcctagataaaggtggtggttacacaacctgtgactgcaccaaatgccactaaattgtgcactttaactgaagtgttagtatgtaatattatccttttttttttgagatggagtctcgctctgtcacccaggctggagtgcagtggcgcgatctcagctcactgcaagctccgcctcccgggttcacgccattctcctgcctctgccttccaagtagctgggactgcaggtgcccgccatcacgcccggctaatttttttgtatttttagtagagacggggtttcaccgtgttagccaggatggtctcgatctcctgatctgcccgcctcggcctcccaaagtgctgggattacaggcatagagccaccacgcccggccaatattatcattttttggagacagggtttcactgtcacccagcgacctgcaacctcaaacgcctcaggctcaggtgatcctcctgccttaggctcccaactaactggaactacaggtgcacgccactacacccagctaatttttatattttatggagagacgtggtttctccatgttgcctagactggtctctgaactcctgggctgaagccatcctctagcctcagcctcccaaagtgctggaattataggcctgagccaccatgcccaacctgaagttctttttatttttttaagtgacagggtcttgctatattgcccaggttggatttgaactcctgggctcaagtgatccttccacctcattaattttctttttctagagacaaggtttcactctgtcgctcagactggagcgcagtggtatgatcatagctcactgcagcctcaaactcctgggatcagtcgatcctcttgcctcagtctcctgagtagctgtgactataggcacacaccacctcatctggctaattttaagtttttcttcttgcccaggctgatctcgaactcctgagctcaagcgatcctcctgtcttggcctcccaaagtgctgggattacaggcgcgagccactgcaactggcccattaaatttttagtaagtatgtatgtattactcttacaagcagcagaaatgacaggagtgtggacactcctggggagggagaagagagcaaactgccatgctggtggacaggcaggccaggaagccgtctgctcagccaccgcccctgtgctgaggctggccccctctcaaacaggctttcccagaccactgagtactcaccatggggtgattctgagccgtcttcagcagtgacaagggaagctgaaaggcaaataaagccacatgatttgtctgtttgaccagcgcctgggagctctggtcttgagtcccacccatgactcatagatggtgcggtgcggttgagggggcacaggagtgcgtgtcaatcaccccccactggaaatgccatttcctcactctgcccagccctggaacacacacctgcctctcagattaggaagaaaagcctcacacaccctccctactcccgtaggtggccaccacctgctcttggtgctgaacactctggtcaattttttttttttttttttttttgagacggagtctcgctctgtcacccaggctggagtgcagtggcatgatcatggctcactgcaacctccacctcccgtgttcaagcctcacaagcagcttgcctcagcctcccaagcagctggggacaacaggcatgcgtcaccacacccagcaaatttttgtatttttaataaaggcggggtttcaccatgttggccaggctagtcgcaaactccagacctcaggtgatccacccgcctcggcttcccaaagtgctgggattacaggcatgagccaccgtgcctgccctaatgcttgtattttaagctcaaactggtatctctgagatgcatccatgttgatgaggttactctgagtatggagttgaggacactacagcttggaaacccgaggaacttgcccagtactatggcgctaggaggagacagagctggcctggtcctgtctgtctgaagcaagcacaagaccatgccttgcagggcagccccaactggcccaagactgacactgccaggccccaatgcaggggtcaatcccatcagagaaggccacatctgagctggttttatttttatttttttagatgaagccttgctctaaaaatacaaaactttgctgggcacggtggtgcgcatctgtagtcccagctacttgggtgctgaggcaggaggattgcttgagcctgggaagcaagcctgtcacccaggctggagtgcagtggtgtgatcttggctcactgcaacttccacctcccgggttcaagtgatcctcccgcctcagcctcccaaatagctgggattattaggggtgcaccaccatgcccagctaatttttgtacttttagtagagatggggtttctccatgttggccaggctggtcttgaactcctgacctcaaatgatctgcttgcctggtcctcccaaagggctggggtaacagcattgagccatcaccccccgcctgaactgggttttctttttttttttttttgagacggagtctcgctctgtcgcccaggctggagtgtagtggtgcaatctcggcttactacaagctccgcctcccgggttcatgccattctcctgcctcagcctcccgagtagctgggactacaggcgcccaccaccatgcccggctaatttttttttatttttatttttgtatttttagtagagacagggtttcaccgtgttagccaggatggtctcgatctcctgaccccgtgatccgcctgccttggcctctcaaagtgctgggattacaggcgtgagccaccgcacccggccctgaactgggttttcaaagacaggaagtcaccaggtaaggtgaactttcaagatttttttttttgatggtgacaggcttttactatattgcccaagctggttttgaactcttggcctcagggaatcctcccatctcaagctcccaagtagctggaattataggtatgcaccaccacgcctggtttcaagatgtttttttccatcattactgaatttctttattatgtcaaatatgtagtatttctattactgggggggaaatcaacactttcattttggaaacagaaaactcaacccgtacgctgggagctgcctcgggtaacgcagagctgtgcctgggtgcggggtcctataacatgcccgttctagtactgccatgaggaaggccccagcaccaaggggccctgacaagacagtgcctcatgggacacaggcttcacctagccctgtcctggtgactggaattccaggtggccctgaccccagatgcctttgctgggagtcctgccctggccaccaccctaatccacagtgtggctgcttttccaggtggtgtgaacttgaaggcctctccctgtggaggccggaaatggccctcaaccctggccgggtggctccccaatgaaaggaaggggttggggagggaatcctacatcccacagccccttcctgagaagagctgcccaggggaggttggtgccagcaggaagccaggcccaagcccacttcctgcaccggcttcctggaagagccagataagggggaagaaagggccatgtggccccggggcagctgctaggagaggcaggggaggagggctgcgggcggctgggtgtgcatctgactgggtgccaccagccacagagaaaacacaggagccacagactggcacacgggtctcatgcccaggtcgccctttactgtgaagaagccgtgggttttcctcagcaagcctgttttctttctctagtccgtaacaggaacgggaccttggacctcctcctggatcaccagggaaggcgcagaggtcaggctagcccttaaaggcccacctctcattctgcagaggaggcgccagcgcccacagcagaagtgacctgcccagggacatccagcaaggccctggcaaagctgcccagaggcaggtagcttgtagacacaccttccatgccagtgacagaccctcttgggccaccacctggtctcagcgaccaatagcacagcctgggaggacccacggcctccttgcctgtcacttgcagtcccatccaaaaagcagcagaaagaacatctgagaaacaaagagagctggtgggatggccacggaggctctcgcctgtaatctcggcactttgggaggctgaggcgggcagatcacctgaggtcaggagttccagaccagcctggccaacatggcaaaaccccacctctactaaaatacaaaaattagctgggcgtggtggtaggcaactgtaatcccagctactcaggaggctgaggcaggagaatcgcttgaaaccaggaggcagaggttgcagtgagccaagattgcgccactgcactccagcctgggcaacagagcgagactgtttcaaaaaaaaacaaaaaacaaaaaaacaaaacaaaagaaagactggctaggcgccgtggctcatgcctgtaatcccagcactttgggaggccaaggtgggcggatcacgaggtcaggagttcgagaccagcctggccaatatggtgaaaccccatctctactaaaaatacaaaaattagccaagcatggtggcgcacacctgtagtcccagctacttgggaggctgaggcagaagaatcgcttgaacccaggaggcagaggctgcagtgagctgagattgtgccactgcactccagcctgggtgacagtgacacttcatctcaaaaacaacaacaacaacaacaaaaaacccaaatagggttggtgcagacccactctcacaacactcctcaggcccgctatagagtcaaggcagacaggctctgccacactggccgccacacccattcctgccacctgacctttgcttctgctattgcctctgcctggggtgaccttccccaggctgctgaaacgtcacctcctttggccaggcccttttaatggccaccctctgcctcatgggtgtttgtttccatcataggatgcagccagtctttaattaccttgtttattacctgtgtccctcgctagactggaacactcaaagtgggtgtggactttgtccagggccaagcacaaggccaggcacatgagagggactcggtaaatatttgctgaataaatacacaagaaaaatgcacacactacccagggaggcatgcagggaaggcagaacactcgccccaccccacaggtaagggaaggagtggctgcgggacagggagctgcctgactcccaggccctcccaggctgcaatggcctgggcctgtgaccatatatcttgatttctcctacatcctcatctccaaactctgttggagagaggtcagaggaaggggtggatcctcaaaatcttaaaagaagatacatcaaagtgccaggtgaggctgggcacagtggcttgtgcctgcaatcacagcactttgggagactgaggtgggaggatcgcttgagcccaggagtatgagaccagcttgggcaacacaaaagattctgtctctacaaaaaatctagaaattagccaggtttagtgatgcatgcctgtggtcccagctacttgggaggctgaggtcaggtgggaggatcacgggccagtgaggttgaggctgtagtgattgtgccactgcactccagcctggatgagagtgagatctcagctctgaaaaacaaaaaaagtctagagtgcagtggctcacgcctgtaatcccagcactttgagaggccgaggtgggtggatcacctgagctcaggggttcaagactagcctggccaacatagtgaaacctgatctctactgaaaatacaaaaattatccaggtgtggtggtgcgtgcctgtaatcacagctacttgggaggctgaggtaggagaatcactctcggagaggtggaggttgcagtgagctgagattacaccactgcacttcagcctgggcgacagaacaagactctgtctcaaaaaaataaataaaatgaaatagaaaaagaaaaaaagtgccaagtgtgataggagaggccccaccctggtttatggaaggtcacaagaaaattcagaaaagagaattcctttctctgggctttcttggagcatctggaatctggttctcaggtctagatccacgaggacctaaacccagtgcctcctaattcaggaagctgtccaggactgcccatccccgctgctaacctaggccactccttctggccctgccctgacgacagggaactggaagtgtgtatcctgtgatggcttgtccattctcggctactcctccaggaaacagctggacagccaggactctggatgttcagaaggtgggaaggggctgaatgaatgagttcacactttgcccacgcaccgttctacatactgggaatctagtcggaagaaaaacgaagatcctgctcccacaaaacttaacacagggatggatccttccagctctgcccagtcttacatgccaactctgccctctaagtacaccgcagagagggacaggctctctgaatccttgcacttgaaatcgcctttgcaaaaattgtagcgggaaattatgacagtgaaaagagatcagacctaaccgactccattgtgcttctaacctttacgccatctttgcttattcctaggtataggccaaactaaccttgggaagggatttagtttatagtttgactctggaacaaaattggtaatagccctttcccgaaaagaccctcttcttgcctggggaccagtctgcctttgtaggactaacaaataagctacaagattagaaattaccatttaggtaacttcagcctctggctgcaagagtctgaaactccccaaattgctccttgggataacatcactattataaaatctaagatcagtgcttgagatattttgcagaccccgtacttgacggatcagctgacactacccagaccagtaatctggctcaaccagtcctgcgatcccacccaggaacagaagacagcaagaaaacctcacttcaacactcccgtcgatgactccatcgacctcaggaagctccaaccaatcagcactccccacttcctgagcccctacccgccaaattatctttcaaaactcggatcccctaatgctcagcggagactgatttgagcaataataaaactctggtctcctgcatagctggctctgtgtgaaatactctttctccactgcaattcccctgtcttgataaatctgtctaggaagacaggcaaggtgaacccattgggtggttacacactgaccagccggatttagggagagttctcactaatccacagttctgatgcagccacccctgggggaccctcctggttactgaatctcccactgtctcacagagtctggaagtcacatccccaacaagggccttggtttctctcattgaaaaaagaaggaccagaagctgatgggccaggaaactcccagctctgaattccttttccgatctgcacagtgggggacacgggcactttctagcccagatccagaacttccagaatcataaacaatgggccctgcagagacctgggccgcaatttttccttctttgtattgggaggatgtactttgtccacccctagctcaaaacgcccccttccgctggaatgacatgctatgtgacccaaggagaaacaccacaccccagcaccaggcctgcttttcagccagaaaccaagaggcctaggaggctgtgctgctagcatcttgcaagctctgaaattcctaaaactaagtttcacaactcagactggccccctacttcccagcactctagttttcaatcagggaggtcagactgggcccgaagcgtaagggaccccttccctgcccaaaaactctctgctgcatttggcggatccccaccttttttttttttacttcagtttccccacctgcaaactgggaaaactaactaaggcgaggccactgtactgtggatacaagtccgtgcaaccctaaatcccagacacgaacgtgatagagccacctgcagtctccggcctcagtttcccagcctcgtgccggggggcgggactcgaggctcggaccttacgttcgccccgcgccaaccaagcccacagcgcccgcccgcagggatcccaacgactgctgttcccgcctcccggtgagaccccgcagttgccctgccctcaccatggtgccggcggggaccgggctcgccggccacttccgccgccgccgctgcacacgctcccggcggtcgtcgccgcgccgcgcgccactaagctgaaagaaagtggcagagacgcaagccagtcagcaccgggctcgaagggcggtcaaccaatccacgcggagtagggcggggcccgctgggcgaaagggcggggcgggccgtgttcccgccggaggaacgaggacgagagccgtaaagtgccgcggcttgtaatgcaaaaggaggcggagcaacgcgcgccggcgcggggtgcattgtgaggaaatgcgtgcgcaggtgaaaccttcgtcggtctcctgggctccacgctgtgggcaaagccagttaatgcctttcgtttgcagtagagagagagaaatcgaggcttcgtggtgattgggccgtgcctgatgttgcccttccgactcctagttttctgattctgtaattatccagggaacatcatttaataggttggaatcctgaccacgaccctcggggcctcagtttgctccctgtaaatagtagtgtctgctccaaaacgttgcttactgtaaggatgaaatgaatgaaaccatgtaaaagcacttaaaacagcgtctggcacatattaagtacttattacctactctgtgcctgtttctgctcacagaatgaacaaaacacaaaattcgtggccctcagggagacagacagtaaacaaagtaaataggcgaatgctattagttttctggggcctgctgtaacaaatgcccacacactgcgaggtttaaaacaacagaacgtgattttctcacaattcaagagatcagaataatgaagtgaggttgtcagcacagttggctccctctggaggctctgaggacaatctgtgtgtcctatgcctctctcctgggttctggtggctgctgggaatccttggagttcttggcttgtagatgcagccttccgcgttctgcctttgtcgtcacttggccttctctgtgtgtctctgagtctcaaatgtatctctccttttttttttcttttttttttttgtagtagagacagggtctccctatgttgtccaggctggtctcgaactcctggggtcaagcaatcctccctcctctgcctcccaaagtgctgggattacaggcgtgagccaccgagcccggccgctcctttttcttgtaaaggacactcctttctcttattaagtccaccataaatttcaggataatgtcatctcaagatccttaattacatctgcgaagaccctgttcttttttttttgagatggagtctcattctatcacccaggctgcagtgcagtggtgcgatctcagctcactgcaacccctccctcctgggttcaagggattcttctgcctcagccacccgagtggctaggattacaggcacatgccacaatgcccagctaatttttgtatttttagcagagacggggttttgccatgttggccaggaggtggcctcgaactcctgacctcaggtgatccttccaccttggcctcccaaagtgctgggattacaggcatgagtcaccacgcccagcctcgtttttaaatgactgatgctatttattgacattattcataatatcaaaagactgaaaaaaacccaatgcgaccaaataatagagtaatacagctataaaaaggaatgaagacaatcttcatatactgacattgaatggtgtctggatatcttaagtgaaaaaaaccaaggtagagaacagtttttacaatatgtcctcttttgtgtgcaaaaagagaaatacatgcatgtgtatgtgtatatatatttgcatgtgtgtgtgtatatatatatatatatatattttttttttttaaccacaccaagcacgtgaaccaaatttgcttatatttttaataagaaacataaaggccaggctcagtggctcatgcctgtaattgcagcactttgggaggccgcggtgggcagatcacctgaggtcaggagtttgagaccagcctggccaatatggtgaaaccccatctctactaaaaatacaaaaaaattatctgggcatggtggcgggcacctgtaatcccagctactctgggggctgaggcaggagaattgcttgaccccgggaggtagaggttgcagtgagccgagaacgtgccactgcactgcagcctgggcgacagagtgagactctgtctcaaaaaaaaaaaaaaaaagaaacgtaaaaagtacgaaccaggccaggagcggtggcccatgcctgtaatcccagcactctgagaggctgaggtggctggaccacttgagcccaggagttccagaccagcctgggaaatacagcagcaaaaccctgaatctacaaaaaatgcaaacaagtagccaagtgtggtgactgtgcatgaagtctcagctactcaggaggctgagcagggagaactgcttgagcctaggaggcagaggttgcagtaagctgtgatcctgcctctgcactccagcctgggtgacagagcaacacactgtctcaaaacaaacaaacaaaagaagcatgaaccaaaatataggccaggcacggtgtctcacactttaatcccagcattttgggaggctgaggcaggtggatcacctgaggtcatgagttcgagaccagcctggccaacatggtaaaaccccatctctataaaaatacaaaaattatctgggcgtggtggcgcgtgcctgtagtcccagctactcagaaggctgaggcaggagaatcacttgaacccggttaggaggaggttacagtgcatgccattgcactccagcctgggtgacagagcaagactccatctcaaaaaaaaaaaaaaaaaaaaaaaagtaacctgggagaataagggaacaagatgaaatcataagaatgaaagccagacttctttcagtgtaccttattgtctagtttcaactttggaagcataattaaaaataaaagtcaaaaggaaaaatcaaaagaaatccctaaaaatggaaacaaacaaatgaacctcactgtatatcaagttgcaaagaccctatttcaattacagtcacattcacagctaccagcaggttaggatttggatatacgtgtgtgtgtgtgtgtgtaaatttttttacgactgcgtccctcttgcccaggttggagtatagtggtgccatatggcttattgcatccgcaacttcctggggtcaagtgatcctcccatctcagcctctgagtagctgagactgcacacaggtgtcaccgccacgcccagcttatttattaatttaatttatttatttattcattttgtagagatgggggtctgcttgttgccctgccctcaccgtgctagcctccaactcctgggctcaagagatcctcccaccttggcctcccaaagtgccaggattataggcatgagccaccatgcccagctgggatatatatttttaggggctactactcattacatcaagtatcagctgtggtagctttaaacataggcatttatttgagtagtttacttctccacagtgacatgcctatagtttttttttttttttttttttgaaacagagtctcattctgtcactcaggctggagtacagtggcgcgatctcggctcactgcaacctccacctcctgggttcaagcgattctcctgcctcagcctcccaagtagctgggattacaggtgtgcaccaccacacacagctaatttttgtatttttagtagagacggggtttcaccatgttggccaggctggtctcaaactcctgacctcgggtgatccacctgcctcggcctcccaaagcgctgggattgcaggagtgaaccactgtgcccggccaatgacatgcctatagttacatacacttgcaagcaggactataacctgaattcctagaagaggcttatctaggtgccaatcaaaggttccatcccctggccacatgccttgactttcaggcctacaaatgagcaataggggacctcataaagtgactccttgtatcccagcctcctgagtctcagcactgccctgagagccttttcttaccaagtccagggtgaggaacttctggctgaaaggaccctatgcctctcagagctgaactggggaacccttgttcaacttctcaaagattttcctgctgggcatggcggagcacgcctgtagtcccagctactcaggaggccgaggcaggatgatcgtttgagcccagcagttcgaaatcccaattccctgatccttctgactggcaccacatccaggtggagtggactctggaggtctgagaaagcccagggagccttataagaggaagccaggccaggcgcagtggctcacacgtataatcccagcactttgggacgccgaggtgggaggagatcacttgagccagaagttccagaccagactgggcaacataataagacctacgtctctactaaaaattttaaaataggccaggcatggtggctcatgcctgtaatcccagcactttgggaggccgaaagttcaggaaagttcaggttcaggaccagcctggccaacatggtggaaaccctgtctctactgaaaaaaaaaaaaaatacaaaaattagctgggtgtggtggtgcgcctgtaatcccagctactcaggaggctgaggtgggagaattgcttgaactagggaggtggaggctgcagtgagaccagattgcaccaccgcactccagcctaggcaacagagcaagaccccatctcaaaaaaaaaaaaaaaaagaaaaagaaaaagaaaagaaaatatggcgaaaccccatctctactgaaaatacaaaaattaggctggcgcggtggcttacgcctgtaatcccagcactttgggaggccgaggcaggtggatcacctgaggtcaggagttcaagaccagcctggccaaaatggtgaaaccctgtctgtactaaaaatacaaaaattagccaggcgtgttggcgggcgcctgtaatcccagctactcaggaggctgaggcaggagaatcgcttgaacccgggaggcggaggttgcaatgagctgagatcgcaccattgtactccagcctgggtgacagagcgagactctgtctcaaaaaaaaaaaaaaaaagattagctgggtgcagtggcctgcggctgtagtcccagctacttgggaggctgaggcaagagaatcacttaaggccggaaggcgcagtttgtagtgaaccgagatggtgccactgcactccagcctgggtgacaaagtgagactccatcataaaaaaaaaaaggaaagaaacagggtctatgaggtgtcccagcatcaacatggcgatgaaggtagcagcaaaccgcatgctgggtcatcctttctgacttttctagacttttctacatgcagtctttctttttttgcacaacttgcaaactcctattcatcgttgaaacctctgcttcggtgtccccttgtggcagccagtggttactgcagtttttttgtttgccctttcaacagtaagggtggccaatcagcgttccccatccccctggctacagggattggttaaagaaagagcacggaatttaccaaggccaatgagattctcccctgggaaggataccgagggctgggagggagaagagctggttcctggggagttaaagggaaagtccagcaccccttaggctctgtcctctggaagaagctttctgcagaaataatccagcagacacaagacaacggaggtactcggtggaaagggaagtatggtttgagcccctggatccagctatagttgaagccacagctatgatgagcttaaatgagcccaagaagttttttttaattgcttcatccacttggaatttgcagtctgtccctggcaaaagagccagtactaatgcatatctgctctgtgaactcttccttagctgccttgctcaaaagctaatcattccttctcttatactttgaactttagtaccctccactgatttccatcattgcctggtttatgccatgttgtaattgcttgtttcagccctctcaactttgacttgtaggagcaaggacctaagaggtttcctggggctctatttggggctgttcaggacagtttaccctcccctatcatcatgaatgcatgacccaggctggggcaatcagaaggcttccctggctggctgagcatggtggctgatgcctgtaatcccagcactttgggaggccggccggtggatcacctgagcccaggagttcgagaccagcctggggaacatagcgagacctcatctctccaaaaaaaacttaagaagaattagctgggcgtggtggcacgtgcctgtaattccaactacttgggaggctgagatgggaagatggcttgagcttgggatttcgaggctgcagtgagccatgatcatgctactgcactctaccctgggtgacagagcgagatcctatgaaaaaaaaaaaaaaaatcttccttgggatggttttgggattgcagagctggagtgatcggcgatcacagtcaggtatagccatggccatttcttcactgcagagtcatggccgtgtctaagcctgagcccagctgtatctgatgcttcataaatcttcattcttccgtattccactaaccaaaatcctattctggatccagcttaaattatatttctgaccgggcacagtggctcacacctgtaatcccagcaatttgggatgccaaggcgggtggatcacctgaggtcaggagttcgagaccagcctggccaacatggcaaaaccctgtctctactaaaaatacaaaaattagccaggcgtggtggtgggtgcccgtaatcccagctactcaggaggctgagtcaggagaatcacttgaacccaggaggcagaggttgcagtcagccgagatcatgccattgcactccagcctgggcaacaagagcaaaactctgtctcaaaaaaaaaaaaattgtatttcttccagcagaaacctaagaagtctagatcaatgtacgtctccaactaacaaaaataccctacccactactaaaaaaaaaagaacagcataaaagccagtactggcaaggttgtgatgaaactggcaaacatgtgtttccttttaaatgggaaaaaagttggtattatatctcaaaagctataaaagtatcacacccttcagctcagcaatccatttctgaacatttctactaaggaagtctttcgggtgaagggaaccaccatgccagggcctcacagcaatatcgccaattctaaaagagcaatattttgctgggcgcagtgcctcacacctgtaatcccaacactttgggaggccaaggcgggtggatcacttaaggtcaggaattcaaaaccagcctagcccaacatggcaagaccccgtctctactaaaggtacaaaaactagccagccatggtggcgtgtgcctgtaatcccagctacttggggggctgaggcatgaaaatcgcttgaacctgggaggtagaggttgcagtgagctgagatcacgccattgcactccagccggggcaacagagtgagactccatcttaaaagtaaataagtaaatagcaggtttttttaaaaaaaattagctgggccaggcgaggtggctcacgcctgtaatcccagcactttgggaggccaaggcgggcggatcacgagatcaagagatcaagaccatcctggtccacatggtgaaaccccatctctactaaaaatacaaaaattagctgggcatggtggtgatcacctgcaatcccagctgtttgggaggctgaggcagaagaatcgctggagtccaggaggtggaggttgtaaagagctgagatcgcgccagtgcactccagcctgggcaacaagagtgaaactccgtctccaaaaaaaaaaaaaaaggaaacgcagacaccctcctgggttgcgcttcgctggtcaaggcagtgaccctctcccatccggggaaccaggagcctcacatggatcaggcccttcctgatccatggccacctgagctgaaacaaaatatcatttgtaccttgcccagtgcattcctggggtgcaggcaaccaaagaacagaggttcatttgcccctgtccttggccgccttcatatcccagagtcagaagaagcagagattcctcaaatgggttttgttttgttttgttttgtttttgtttttgtttttactattttgagacggagtttcgctcttgttgcccaggctggagtgcagtggcgtgatctcagctcactgcaacttctgcctcctgggttcaagcaattctcctgcctcaacctcctgagtagctgagattacaggcatgtgtcaccacgcccgggtaattttgtatttttagtagagaccgggtttcttcatgttggtcaggctggtcttgaactcccgacctcaggtgatccacctgcctcagcctcccaaagtgctgggattacaggcgtgagccactgcacccagccatggggtctttctttcttttttttttttttttaagacagagtctcagaaagaccccctcaagtggggtcttgaaacttcctccactgtccacctacgcccagtggcctggtagaagttccttagatgggcacggagactgctggatccagccccccttcatcctgcacacatctctgcccccgcgcattaattgtgcacctactgtgtgctggcacagactaaagggaaagaagacccagcctcaacgttcaaactactccaggcgaaaagagggagaggcaggagtggggagtggagcagtaaatataccctccaaggggcgggccagggctggatgtgggagcaggggccatgggcagtggctgaccaccaaaagcacatctgtgggcctagtctttttgttgttgttgtttgagacagggtctcactctgttgcccaggctggagtgcagtggcaagatggtagctcaggccaggtgcggtggctcacacctgtaatcccagcactttgggaggctgaggtgggcagatcacttgaggccaagagttcgagactagcctagccaacatggtgaaaccccatctctgctaaaaatacaaaaattagctaagtgtgatggcgcgtgcatgtaatccctgctacttgggaggctgaggcaggagagtcacttgaacctgggaggtggaggttgtagagagccaagatcacacgactgcactccagcctgggcaacagagtgagactccatctcaaaaaaaaaaaataaataaaaggataatagctcactgcagcattgaactcctggactcaagtgatcctcctgtttcagcctcctgagaacctgggacctgatgagctcgctaccaccttcgggtgattttaaaattttttgtagagatagggttgcacagcctggtcttgaattcctggactcaactcatcctcctgcctccacctcccaagtatgagccttgtcttctagcctgagctccccaaaggcttcactatctccagacaccgcctggagaaaaaggacacattcatcctttaagaatgcatgtctgggccagccacggtggctcatgcctgtaatcccagcactttgggaggccaaggcaggtggatcacctgaggtcaagagtttgaaaccagcctggccaacatggcaaaaccctgtctctactgaaaatacaaaaaagtaaccaggcgtagtggcagacaactgtaatctcaactactcgggaggctgaggcaggacaattgcttcaacctgggaggcagaggttgcaatgagccgagatcgtgccattgcactccagcctgggtgacaagaacgagactgtgtttaaaaaacaacaacaacaacaacaacaaagaatgcatgtctgcccagacatctctctccctaccatggccatgaggccccctgcagtcctcaaactgggcttggtttactctgacagagccaaaaggacagagccctaacgcagagccgtgtcgtccccatgagctccaaatctccctcccttccaaggccactcctattagcaactggcaaagcccagagaggcttggagcccccaggggcaggatctgagcgccggtgcagagtccatgagtcctgccttcccccacctggctccctagggcttgggttcagggtggccttagtcctcagaagctccccaaacttccctgggttgtggaggtgggaggctagagaaaaatgtagcttctgcccagcgcagcgatacacatccgtgatcccaactactcgggaggctgaggcaggaggatcacacgagcccaggagttgtgggctgtagcgcactgtgctgattgggtgtccacattaagtctggcatcaatatggtgacctcccggagcagggaaccaccaggttgcccaaggaggggtgaaccagcctaggttggaaacggagatggtcaaaactccagtgctgatccgtagcgggatcatgcctgtgactagccactgcactccagcctggtcgacagagtgagaccctgtctctaaaaaagataaattttaggctgggcgagtggcttatgcctgtaatcccagcactttgggaggctgaggcaggcggatcacttgaggtcaggaattccagaccagtacggtgaaactctgtctctacaaaaataccaaaaaaaaaaaaattagccaggcggtgaaactctgtctctacaaaaatacaaaaaaaaaaaaaaaaattagccgggcatgatgacctgcgcctgtggccccacctactccggaggctgaggcacaagaattgcttatacctgggaggtggggtgagccaagattgcaccactgcactccggcctgggtgactgagcaagattctctctagaaaaaaaaagagatacatttaaaaaatgcagcttgttttgcaaaccaacatccagcttggcaggttttgctctatttagcatttttttgtttgtttggtttttttttagataggtattgctctgttgctctggctggtctcacactcctggcctcaagcaatcctcccacctcaccttcccaaagcgctgggattacagcaggggtccccaacccctgggctaaggactggtaccagtctgtggcctgttaggaaccaggccgcacagcagtaggtgagcagcgggcaaaccagtgaagcttcatctgtatttacagccagtacccatcactccccagtatctcctgagctccgccttctgccagaccagcagcagcagcattagattctcataggagtgtgaaccctattgtgaactgcacatgtgagggatctagattgtgcactccttatgataatctaatgcctgatgatctgaggtggaacagtttcatcctgaaaacatcttcatcccccccaacccccaagtgcatggaaaaattgtcttccataaaaccagtccttggtgccaaaaagattggggactgctggattacaggcatgagcctctgcgtcaggcttcacagcattgttttttgtttgtttgtttttttgagacagactctcgctccgttgcccacgctggagttcagtggtgcgatctcggctcactgcaacctccacctcccagattcaagcgattctcctgcctcagcctcctgagtagctaggattacaggcatgcaccaccatgtctggctgatttttgtatttttagtagagatagggtttcaccatgtttgccgggctggtcttgaactcctgacttcaaatgatccacccgccttggcctcccaaagtggtgagattacaggtgtgagccaccgtgcccggccatttattttattatttatttatttttattattttattttattttattgagatggagtctcgctctgtctcccaggctggagtgcagtggcgtgatctcggctcactgcaagctccgcctcccgggttcacgccattctcctgcctcagtctcctgagtagctgggactacaggtgcccgccaccatgccctgctaattttttgtatttttagtagagacagggtttcaccgtgttagccaggatggtgttgatctcctgatctcgtgatccgcccgcctcggcctcccaaagtgctgggattacaggcgtgagccaccgcgtgtggcctatttatttattcattgagacagagtctcgctccgtcgctcaggctggagcggagtggtgcgatcttggctcactgcaatctttgccgcctgaattcaagcgattctcctgcctcagcctccaaagtagctggaatcacaggcatgtgccactgatacgggagtgctgggatggggggagcgtggtgcctttaaatgatagggaagggaagtgcggggtaaaggagggcctggtccctggctagggctccacccccagagacctaggtgaggatccgcactcccgccttcgtgcccaaatattgcattttccaggaccacactggcccgccacgcccccatcctgtgcctataaaaacccgagaccctagcgggcagacacacaagctgctggacgtcttgacgtacacatccatggaagaagatacaagtggctggacagcgagaggacgtcgagggagcacgctcgcggaagggcacactggcatgcaggcgggtagtcgaccagtggaactaggctgagtttggcctgggcagtcagaggagagctggggccgcctagcgacccaactccagagaaagaccatctcccttctcgctcccccatctactgagggctacttccactcaataaaacttcatactcattctccaagcccaggtgtgatctcattcttctggtacaccaaggcaagaaaccccaggatactaaaatccctctgtctgggctgggcgcagtggctcatgcctgtaatcccaggactttgggaggcctaggtgggtgtatcactcaaggtcaggagtttgagaccagcctggccaacatggtgaaaccccatatctactaaaaataaaaaaaattagccaggtaagggtgcggtcacctgtagtcctagctacctgggaggctgaggcaggagaatcactttgaacccgggaggcggagatggcagtgaaccaagatcaagccactgcactccagcctaggggacagagcgagagtctgtctcaaaaaaaaaaaaaaagaaaagaaaagaaaaaaagaaaagaaatccctctgtccttgtgacaaggtagaggatctaactgagctggtaagctgcctatagatggcaaactaaaaaaagcaacctgtaacacacgccccctggggcttcaggagctgtaaacattcaccccggacactgctgtggggtcagagtcccacagcctgcccatctatatgctcccctagaggtctgagtagaggagcacttcagaagcaagccacacccccatcgcccaccctgcgaggggaacaagggaacctttcccgtttcaccaccatgcctggctaatatttttgtatttttaagagacagggttttcccatgttggccaggctggtcttgaactcctggcctcaagcaatccacctgcctcagcctcccaaagtgctgggattataggcatgggccaccacacccagccacagtcatccaattcatagagacagaaagtggaatgttgggtgctaggggctgagggaggggaatagggagggagcgtttaataggtatggagcttgtttgggaagaacaagttctggagatggatggtggtaatggttccacaacaatgtgaacgtacttaatgctacccaagggtatgcttaagatggtaaattttatgttatgtacatgttactacaaaccactgccccccaaccccggccgaggcgggcagatcacttgaggtcaggagtttgagaccagcctagccaacatggagaaaccccatctctactaagaatacaaaaattagccaagcatggtggcgtgcacctgtagtcccagctatttgggaggctgaggcagaagaatgacttgaacctgggagacagaggctgcagtgagccaagatcgtgccactgcactccggcctgggtgacagtctcaaaaaaaaaagttcctccaagttgggcatggtggcacatgcctgtagtcccagttacttgggaggctggggtgggaggatggcttgaccccagggggtggaagctgcagtgagctgtgactgtgccactgtgctccagtctgtgagacaaagcaagatcatatctcaaaaaacaaaaatatggcccaaacatgattagggctacgagtgaacattagcctttacgccagtcactggggcagtggggcatgactcagtttctccccatcactgctgactctacatgttttcgttcctcccattgcaattgaggaaactaaaatccactgtcacttccctctcgccttccctcttctagcaacgcacatactccacaccaggcacgtatgacatattcaggttataaaacctgcctttgggtgagtggtttttttgttttgttttgtttttttctgagacggagtctcgctctgtcgcttaggctggagtgcagtggcacgatctcagctcactgcaacttccgcctcctgggttcaagtgattctcctggctcagcctccccagtagctgggactacaggcacgcgccaccactcactgctagttttttgcatttttagtagagacagggtttcaccatgttggccaggctggtctcgaattcctgacctcaagtgatccgcctgcctcggcctcccaaagtgctgggattacaggcgtgagccactgcgcctggccaggttagtgttttgatctgctcttttctccctcttggcttggacctcattccctggccagctcagacagctctctgatgttctgcattctacctgaagctgctaaagaccaaaatagccactgagcgtgtgacctggggtgtgggcttccaaacagggctcaggggcagtctagagaactctgcccttggtgttggaggaattcgggggtggagccagtaaacaccatagtaccagctgggcacggtggctcatgtctgtaatctcagcactttgggaggccaaggcaggcagatcacctgatgtcaggagttcaagaccagcctggccaacatggtgaaaccccatccctactaaaaatgcaaaaattagccgggcacggtggcaggtgctggtagtcccagctattcaggaggctgaggcaggagaatcgcttgaacccaggggccggaggttgtagtgagcctagatcgtgctattgcaccccagcctgggcgacagagtgagactctgtctcaaacaaacaaacaaaaaaccatagtgtcttggcgaatgatggcaaagtcaaagtggaacgggctatcagtgaaccacacagtcaggagttctggctcatgcctgttatcccagcactttaggaggctgaggcaggaggattgcttgagcccaggatttcaagaccaacccaaacaggcaacatagcaagacctcgtccctacaaaaaatataaaaattagccgggcatggcagcacgcgcctgtagtcccagctactcgggaggctgaggtggaagaattgctttagccttggagattaaggctgcagtgagctgtgatcgctccattgctctccagcctgggcaaaagaacaagatcctgtctaaaaaaaaaaaaaaaaaaaaaattcgtgacccaagtccaaggtccagtcctgtttctgaagatgtggccagaaactcagctttcattttctacctgtttttagaggaattctggtctctgatgaatgttggcagaatgtgcctggggatgtgctgggtgttgagacgcagctctaacagaacaacgcttcctcctctagaagttctcatctctatgtcggaggaaacgggaagccaaccagagaggctgtgaccatactaaatgatttctgcttaataatacctggggagggggccggaggcagtggttcacgcctgtaatcccagcactttgggagctgaaaagggtggatcacctgaagtcaggagttcgagaccagcctggccaacatggtgaacctccctctctactaaaaatacaaaattagctgggtatggcggcactcgcctgtaatcccagctacttgggaggctgaggtgggagaattgcttgaacccgggaggcagaggttgcagtgagccaagatcacaccactgcactccagcctgggtgacaagagtgaaactacgtctcaaataaataaatacatatataatttctgcttaataatacctgggggactaaataatctgtacaacaaaccccatgacacgagtttatctatataacaaacctgcacatgtaccccaaaacttaaaagctaaaaaaaattaaaaatgatttctggccaggtgtgctggtttacacctgtaatcccagcacttttgggaggccaaggtgtgcggattgcttgagctcgggagttcgagaccagcctgtgcaacactatgaaacccccatctctacaaaaatacaaaaattagctgggtgtggtgccacacacctgtagtcccagctactcaggaggctgagatgtgaggatcagttgagccctggaggtcaaagttacagagctatgattttgccactgcactccagcctgggtaacagagtgagaccctgtctccaaaaaaaagagagagaaaggaaattatttctgagctttattgctatgaagaggatggaaccagggaatgagatggaaccactggggggtagcagtgaggtcatttcagccaaggagggccagaaggaaccctcagaggaggtaataggatagcagggaggtgatagccagagaaggccacaaggagaaagtgacagttcacccctcggaggaggtgacagccaggacaggaggagggcccctgggaggaggcgacattggaacactggagctgaggcctgaaggaggccagcttcgcaggtacctgcggggtgtgttccggcagagggaacagcaggtacaatcgccctcccccattagcctcctaggaccatgggggcctgcagagaaacttctggcaccacacaaatatggttgtcgtgtttttccttttttactctgtcctcccccacccccgccaacttcctggcctgaatgctgctcctgtgaccccttgaggcgagtgacctcggggaagtggcattctgtgcctcagtttccttatctggaaaacgggccttgctcgcggggacttccctccctaattctgcgcagtatgcatgcatagggcaggccctcaatgaacccttgcagaataaaggaccggctcatccccagcacctggctcagtgcgtgcaagcggctacacactacggcataagatgttcccattttgcagacggggaaacggaggctggggaataccgggcctagccgacgggggcggggcgcagggcgcgcacgctgcgtctcgggcccgggggcgcgcacgccgagcggctgaccgggggcgaggccgggggcttgacaggggcgtggcctcgcgcggccgagaggctgcagcggcagcagctgtcgcgccagtcgcaacagaagcaggtccgaggcacagcccgatcccgccatggagcagccgaggaaggcggtggtagtgacgggtacgctggctgatgggggctgtagcggcagcggccgggggcagaggcgggggcggctccgggactgcggggccgagaggggcaggtgctggaagtcctctcagatttggaaggtgtcatcacccgcgggagccccgcgcagcccaggcttcctggaaagtggaggaggaggagccttgggggtcccagggtcgggagtcagggcagtcgggcgcggggcttggggggccgggcaaaagcccggcgctgcgcaggcccccctggcgtcctttcctcccaaggtggggatggtgaccctcctggcacctgcctcctctgtctggcctgcgggctggactggacccttcctccctgccccttccgaggtccagcctgtccccacaccgctcccccaacccctggccccaggggacaaaggccgatttgcgggcaggaagtgtcccagtgacaaatgaacctcccagtcactgctcgccgcgccctgcgctcctggggggctactctcccaaggcaggggcaggtgggggtccggggacctcgggctctcccagctgtcccagggactgtcttcagcggaaacctttttgtgttttgtgccagggctgtttgttggtgagtcagggcccctgctgtcaccgactcccccccacccccaaaccaactgtttctcctccctgagactccgcctcggggccacgtggggcgccaacttccgctggggcctcagagtcaaggagtgggggggtcattttgacctgctgtctggaggggtcagagtgggaaatccagcaaaggtgcacacaggtgttttgtggctgttgaagggagattgaggctgatccaggagattcagggaagaaggaagaaacaaggcacctgcttaacaggtgtgtataattgggaggagggtcactgcccccatcccttccagccttcctttatctggttatttattccagcactttttgcatgagctgattacatctttactgtctccattttgcagaaagggaaactgaggctcacagaggtcatccagtttgtaaggggctgagctgagactcaaactttggctgtacagaaggatagagttaggaggtcccctcctgagccacagcccctacctgctatcccaggctacagcatctctgcatagcattcatatcctgtgggatcactggcccagatggaccgtatttttttttttttgagacggagttttgctcttgttgcccaagctggagcacaacggcgcgatctcggctcactgcaaccttcgcctcctgggttcaagcgattctcctgcctcagcctcctgagtagctggaattacgggcacgcatcaccccatctggttaattttttgtatttttagtagaaacggggtttcaccatgttggccaggctggtctcaaacttctgacctcaggtgatccgcccgccttggcctcccaaagtgctggaattacaggcatgagccaccgcacccagccccagatctggatttgaatcccagctttttcaccttcttgctgtgtgaccttgggcagctagcttcacctctctgtgcctcagtccctgctcctggaaactgggcctaggaaacacccttgcctgaaaggggatgtggccaggcttaatgccaggaagatcacttagcacagccttgggcgactgtcgtgttttggaaagggggcctggagtttgagctagcagggaggagggtgacaaggtgaaatctagacagcctggagggctcattcctcatttggtgccgattcagggcattttgggacagtgacacaataattgtaggttgagtcaaggggaccagaggaagtgaagacaggatcaggaccttttcggaggcagaagatacctctggcccctggctgagcatgaggggcaggtggaggtgaagacaggaagggactcattgacttcagagcggacaggtgcaggacggcggctctgacgggcctccaggtgctcccagaactcaggaccaggcccccaatgttgtccttggcagctgcgccctgaagctcctttcttgcttctccaggtgggagtagcggccaggccaggggcagactgggaagggccactcttgggtaatatattgcttttcctgttttttcaggatttggcccttttggggaacacaccgtgaacgccagttggattgcagttcaggtaacttagatccggagggtgggagtcaggcttggagctgggcacaccccagaaagttatggcatccaagaaggtccccttttaacaaaaacttttttttttttttgagacgaaatcttactctgtcacccaggctggaatgcaatggcacaatctcagcccactgcaaccttcgcctcctgggtttaagcgattctcccacctcagcctccagagtggcagagattataggtggctgccaccacgcccggctaatttttgtatttttagtagagtcggggtttcaccatgttggccaggctggtctcgaactcctgacctcaagtaatcctcctgcctcagcctcttaaaatgctggaattacaggcgtgagccactacgcccagccagctcttaaaaaacgatgtcggatccacatctcttcctggatggtaaccaccggagcacacatctgttgagtgtttgtaccccagcgctctgaatcctcccaacaacccatgcatagtacgtgtagttattcttgtgcccacttaacagaataggaaactgaggcccagaggagggatgaagggagttctccgaggtcacacagccaagaaatgggagtggcattgcctcagaagtgccccaggccctggccagcggctacagatctgggtctggagggccaggtgtggatataaacgtagctggtttccaggacacagctgtttatgtggtgctggcgtctactttacctaggaattatccaactctaggatctccctcttttttttttttttttttttttgagacgaaatctcactctgttgcccaggctggagtgcagtggcgcgatcttggctcactgcaaccttgccttctgggttcaagcgattctcctgcctcagcctccagagtagctgggattacaggcacctgctaccacgcctggctacttttttctatttttagtagagatggggtttcaccatgatggccagactggtctcaaactcctgacttcaggtgatccacccacctcggcctcccaaagtgctgggattacaggtgtgagccactacccccggccaggatctccctcctttttaaaaatcttttccattgactcagacaaatcgtgactcaggttggtttctgaacagccaaagtgagaattctctggtatgttttaggcaggtaattcatggttcaggaaggaccaggcaggaatatgtggggtggggtggcaggggaacatatcttgaccttgtaggaaggggtacagtgagcctcgctgtcatctcctcgcagctgggggaggaaaagatggcatattaggggccgaggggggctgtcattcctggtgccctgaagaagatgccagtctgcaaaacctttctagtttcttttccagatggagtattttgtagggacaggctggggagcaatgcacagagagaaagacggaagtgttttctcgttatataaatcagatcggcagagaccagagccaaacccctgtttatcctagcctatgagctgcctgatttaaagtaacctctgttcccattccagaatcctagatttggagaaaaatctaagttgaaacctcagcgtggcagtccccagctgtaccccccattttttaatcaccccctcatccccaacttcagacctcaaagttttggctgtttcccttttttttttttctttcctgcccacttcgtgaacgggatggagggacggggtcccgggaccctgcagatgggagcgtgcccgaggccctgcctgctcacccgctccccggagagccagacaaaaagaaacagcatgtttctgaagacttgtgtgtcaggctttgtgcacatttcagacaggagccttcacggggctgagtggacacaaagccgggtgtctgaattcctgggccccagacactgatctacatctaaatagaagaaaaatcaattaaacaatctttggaaatccctccgagcttcggggcttctcggatggtgaaggatggcagctttttatcttgtggccagagaggaaatagcccttctccttggttctcctctctccagacctgcagtttccactttttgctttcttttttttctggagacacagtttcgttcttgttgcccagactggagtgcaatgtcacggtatcagctcacttcaacttccgcctcctgggttcaagcgattctcctgcctcagcctcccttagtagctgggattacagctgcgcaccaccaggcccggctaatttttgtatttttagtacagacgaggttttgccatgttgaccaggctggtcttgaactcctgacctcaggggatccgcccgcctcggcctcccaaagtgctgggattacaggcgtgagtcactgcgcccagccccacttttcactttcttcccaaagtttaggacacaagattccccaccattcgcctgccaaaaagatgccaaccttcttagatctgattgtttcacttaaacaaaacaaaacaaagtttaacatatatacacccagaacactcattagtgaaattttaggcctgatatgatggctcacgcttgtaatcccagcactttgggaggctgaggcaaggagttcgagactatcctggccaacatagcaagaccccatctctaaaaaaaaaaaaatacaaacagccgggagtggtggcgcatgcctgtagtcccagctactcgggaggctaatatgggaggatcacctaagcctggggaggtagaggctgcagtgagccctcatagtatcactgcactctagcccaggtgacagagctagaccctatctcaaaaaaaaaaaaaaaaaaaagaaaagaaatttggccaggcacagcggctcacgcctgtaatcctagcgctttggaaggctgaggcgggcagatcgcttgaggtcaggagtcaagaccagcctgaccaatatggtgaaaccctgtctctactaaaaatacaaaaattagccagaaatcacttgaacccaggaggcagaggttgcagtaagccgagattgtgccactgcactccagcctgggtgacaaagcgagactctgtctcaaaaaaaaaaaagaaattttacatatgtgcacccccaagggccaggtcaagatctcgaacattctctggttcttcctcgcattcttcacagaagccccacatagcctctcccccaagtactcccaagccctcccgatgtaaacctctgcagacttttttgcgccagtaggtgaattttgcctgttccagaagttggcaggaacaagcagcttccaggtgccacacctctgcgagaaccgcccctggagttgctgcttggttccttcctgtcctggatttgcctgttagaaaggtgtcactgctggatgggttgaatccattcctccaaaaaatgtgccctggagtgttgttggtgtaatgcaggcaactgttgccaggcgtcacctccacccaaagatgggtgttttgttctgcactgtgggtggcaattgcttcctgccgtgaccgatttttcggaagctcctcatccttcagggaccccctaagtacttctctgtgtctctcccctcttgctccctctgggtctctctctgtctctttcctttcttctatctgttcatatctgtgtctctcttcatctctctgtctcttctgtctctctctctgtcactttcaccttctctatctgtgtgtgtctgtttctctcttttttttttttttttttttttttgagacagagtttcgctcttgttgcccaggctgtagtgcaatggcacaatctcagctcaccgcaacctccgcctcccaggttcaagcaattctcctgcctcagcctcctgagtagctgggattacaggcatgtaccaccacgcccagctaattttgtatttttagtagagacagggtttctccatgttggtcaggctggtcttgaactcccgacctcaggtgattcgcccacctcggcctcccaaagtgctgggattacaggtgtgagccaccgcacccggctgtttctctctcttgtgtctttcttcctctccctctcgtctctttctgcctctctctctctgggtttctctgttccttcccacctcgtcccttctttctctctccgtttctctctttctcgctctcttttttttttgagacagggtctcactctgtcgtccagactggagtggagttcaatggtcgattgaacgagtgaggtgagcaatctcagctcacctcatccttgacctcccgggctcaggtgatcctcccgccccagcttccccattagctgggactacaggcatgcaccaccacacccagctaatttttttttctttctttctttcttttttttttttttttttgtagagatgggatttggctatgttgcccagactggtctcaaactcctgggctcaagccatcctcctgtcttagcccctcaaagtgctgggattacaggcataaacctccatgcccatccttctctgtttctctctgtctccctgtctctctctctctctgggtcttactatctcttcccctttctctctcttcctctctatctttgttaatctccgtgtgtctcagtttctctccctgtgtgtgtctctgtctccttgtttctttctctctgaatctgtctctttccccttctctctctccccatttctgtttctctctgactccatctctctgtctctgtctctccttttttttttttttttgagacagggtctcactctgtcacccaggctggagtacagtggtgccatcttggctcactgcaacctctgcctcccgagttcaagtgattctcccgtctcagcctcccaagtagctgggactacaggtgcacgccaccacgcccagctaatttttgtattttcagtagagacggggtttcaccatattggtcaggctggtctcgaactcctgacctcgtgatccgcctgccttggcctcccaaagtgctgggattacaggcatgagccaccgcgcccggcctgtctccgtctcttctgatcctttctctttgtcccctgggtgaagtcatgcccacagcataggtggaactgtttcccacccgcagtgttcaggaggtgggagttggtggggtacagaggggacccccccttgtctttcctgggatggcagcttcccccagcaccccaagcacgaggcaccatgtgtctcgtgtgtcccgtctcccctacctctcagggtggactggggcactggctgtgtttctcttccgaggaggtgcaggtgggtgttaagggctggggagctccggggctcggggccatctggggtgtctcttgccaaagctgggtgaggaggacccgggtcacagaacttggtaacatcacgggacaattgctgccacagtgagtctagacagacctgctaaggatattaccagggaacaaagagggtctttgtcgtggggtcaggggaatcggtcagacgaggctgcgcggcggggtcctgtcaggtagatggggtgtagacaatggggcgtctgcccgagccccgtcctttcacggtgtatgctttgatggtgcatgaggccgggtgtgctgctggcaaagtgatgtgggacttggggtgccctgccccccttctcccggaggagaaccatccaacccttttggaacagagcgtgttcagaggctaagacttcagccagattaccagccacacacttccttctagtgccagatacactgtatggcaggtggctccctgccgttaccctatttaaaattgagtgataatttacatcaggcaatgtgaacagaccttaagtttccctatcactttggtgagaaactttttttttgttttgagatggggtcttgctctgttgcctaggttggagcgcagtggtacaatcatagctcactgcagcctcgacctcctgggctccggtgatcctcttgcctcagcctcccaagtagctgggactacaggcatgcaccaccatgcctggctaattttttaaattttattttttgtagagatgggatctcactatattgccctggctggtcttgaacttccgggctcaaatgatccttccacctcggcctcccaaagaagctgggattataggtgtgagccaccgagccctgccatcaggtgggtcttggcaaacacacacatgaacacctctcttgtgactgcaggtcttggggtatgtgtatatgctgacagtggttttctttctttcttgtttttttgtttgtttgttgttttttatttttgtttttgagacagaatctcactctgtcatccaggctggagggcagtggtgcaatctcagctcactgcaacctccacctcccgggttcaagtgattctcatgcctcagcctcctgggtagctgggactcagctaatttttgtatttttagtagagacagggtttcgccatgttggccaggctgatcttgaactcctggcctcaagcaatcctcctgcctcagcctcccaaatcgctgggattacaggtgtgagccacccacccctgaccctatttttctgaatacagctttccctgttgatttttaaagtaacacatcccatgagactcaagacatcaccttgtgcccattagggaaaagacagaaaagaggcagatctgttgatatgggactatgggttgttttattttattgtttttgattttgtaaaacactgaaatggtttaaaagtcaaaatcatgcgatgagttttttgcatagaagtctccctcccgtccccatcgccgctcccattccttccttgcccagaaggtggcacagtctcgccacgggtcatgccgggaaatccctccaggttggtccaaacagagattactcattcttttaaatattttcattttgtttttaattttgatgaaatccagtttatcaattatttttcttttattgtctgtgcttttcgtgtcatttggtgtgtgggggctttttggtcttttttcgagatggggtctcactgtgttgcccaggctgacctcaaactcctggcctcaagtggtccgccccagtagctgggattacaggcatgagccactgtgcctggctgctgatttgttttttgtttgttggtttgttttgagacacagcgagactctagctggagtgcagtggtgtgatcttggctcactgcaacctccacctcccaagttcaagcgattctcctgcctcgccctcccgagtagctgggactacaggcatgcgacaccacgcctggctaatttttttgtgtatttttagtagagacggggtttcaccatgttggccaggctggtctgaaactcctgacctcaaatgatctatccatctcgaccttccaaagtgctgggattacaggcatgagccactgcacccggcctgttgatttgtttttaagagaaaagagctctgtgggtctcctcttggagattaggggaagacgcatttataaacggtaaaattttctcctctgggacgtattgaatatgaggtgggaaaaccaggcttcagtgtaacgatctctctcaatagcaagtatgtattgactgatctgcagtgcagcaatgcccctacttggcatttatgccccacccatcagcatgagaagtttgcatgaggacgttcactgcagcttggctttacagtaaggaaaattagaagccacttagatgttccaatgtaggggaatgtttaaatccatagcgaccagtttctgaggtggagtattatgcagcagagaaaaggatgcgctgagatctccgtatagtaatgtagacagatctctgaaatagactgctgagtggagcaaacagagttgcaggataaaatcaatggctgggcacagtggctcatgcctgtcatcccagcactttgggaggccgaggtaggaagatcgcttgagccctggaggtcaaggctgcagcgagcgctgatggcgccactgcactccagcctcagtgaccagagctggaccctgtctcagaattgcttttttactgcctatgaatggaaaagcagcagtaaatctttttaaaaactttacttttggccgggcacagtggctcacgtctgtaatcccagcattttgggaggccaaggtgggcggatcatgaggtcaggagatggagaccatcctggccaacatggtgaaaccccgtctctactaaaaatacaaaaataagcggggcatggtgcctgtaatcccagctactcgggaggctgaggcaggagaatcacttgaacccagaaggtggaggttgcagtgagctcagatcgcgccactgcactccagcctgggtgacagaatgagactccatctcaaaaaaaccaaacaaaactttacttttaagtgctgttggactttgtctcaatgcaatttttaaaaaaggataaaatcaggccaggcatgatggctcttgcctgtaatcccagcactttgggaggctgaggcaggcggatcacctgaggtcggaagttggagaccagcctgaccaacatggagaaaccctgtctctactaaaagtacaaaattagccaggcgtagtggtgcatgcctgtaatcccagctacttgggaggctgaggctggagaatcacttgaacccaggaggtggaggttgcgatgagccgaaatcccgccattgcactccagcctgggcaacaaaagcaaaactccgtctcaaaaaaaaaaaaaaaaaagaagataaaatcgatgtaaaaacaagccagatgtggtggtacatgcctgtagtctcaactaaggctaaagtgggaggatcgcttgagtctaggagttcaagaccagcctgggcaatgtagcaagaccccatctctaaaagaaaaaattctatgggatttctcaggtgtgtgaataatagattagaaacaggtctgcatggggctgagtgcagtggctcatgcctgtaatcccggcactttgagaggccaagggggggctgatcacttgatctcaggaattgaagaccatcctggccaacatgacgaaaccctgtctctactaaaaatacaaaaattagttgggtgttggccgggcgcggtggctcacgcctgtaatcccagcactttgggaggccgagatgggcggatcacgaggtcaggagatcgagaccatcctggttaacacgatgaaaccccgtctctactaaaaatacaaaaaaattagccgggcatgctggtgggtgcctgtagtcccagctactccggaggctgaggcaggagaatggcgtgaacccgggaggcggagcttgcagtgagccaagattgcggcacgccagcctgggtgacagagcgagactccgtctcaaaaaaaaaaaaaaaaaaaaattagttgggtgttttcccagtactcgggagtactgtaatcccagtactcgggaggatgaggcagaaggaactcttgaggccgggaagcagaggttgcagtaagacaagatcatactactgaatgatttttgataatccatctcaaaaaaaaaaaagaaagaaagaaacaggtctacatgatgtgtgccctgtcacctctgtggtgtgaagatgggaattagtgtaggtttgttgacggaacggatggtggggcctttgaaaaatataattgtctttttttttttgagacagagtcttgctctgtcgcccaggctagagtgcagtggcacaatctgggctcgcactgcaacctccacctcccagattcaagccattctcatgcctcagcctcccgagtagctgggagtacaggtgcgcaccatcacgcccagataatttttgtatttttcataaagacagggtttttccatgttgaccagggtagtctcgaactcctgacctcaggtgatcctcccgcctcggcctcccaaagtgctgagattacaggcgtgagccaccgtactcagccacctctcactattattcaactttttctgggatactgctgagttacttggaaacaggttgaatcttttttttttttccttgagacagagttctactcttgtcacccaggctggagtgcagtggcacaatctcggctcactgcaatctctgcctcccaggttcaagccatactcctgcctcagcctcctgagtagctgggattacaggcacctgccaccatgcccggctaatttttgtattttttagtagagacggggtttcaccacgttggccaggttgatcttgaactcccgacctcaggtgatccacccacctcagcctcccaaagtattggaattacaggcatgagccaccgggcctggttcatttttttttttttttgagacaaggccttgccccgttgcccaggccatagcgcagtggtgcaatctttgctcactgcatgcagcctccccctccctggctcaagcaatcctcccaccttagcctcccaattagctgagactgcaggcatgtgccaccacatccagctaatttgtattttcgagttttgccgtattggccaggctggtcttcaactcctgggctaaagcaatcctcctgccttggcctcctaaagcactgggattacaggcatgagccactgtacctggccaaattaatcattttaaagtatataattgcatggcattaagtacactcactgtgttgcgcaaccatcatctctatctagttccagaacattccatcacccgaaaaggagaccctgtccccatcagtagccattctccattcccctccctcagcccctggcagccactcgtctgcttcctgtctctatggatttgcctgctctgggcatttcatatcaatggaatcatacaatatgtggccttttgtgtctggcttctctcactcagcatcatgttttcaaagttcatccacattgtaccacggatcagtgcttctttccttttcatggctgaatcgtattccatcggatggatggaccatatttcatttatccatctgttgatgggcatttgtgctatttctaccttttggcttttgtgaatactagagaggcttctttttacaaattggacacagtggctcacccctgtaatcccagcactttgggaggccaaggcaggtgaatcacttgaggtcaggagtttgagaccagcctggccaacatggtgaaaccccatctctactaaaaatacaaaaattagctgggcgtgatcccgcatgtctgtaatcccagctactggggaggctgaggcttgagagtcacttgaacccaggaggcagaggttgcagtgaaccgagatcatagcactgcgctccagcctcggtgacagaatgagactctgtctcaaaaaaataaaagactcttgggaggcagaggcaggtagatcacgaggtcaggagatcgagaccatcctggctaacacagtgaaaccccgtctccactaaagatagaaaaaattagccgggtgtggcggtgggtgcctgtagtcccagctactcgggaggctgaggcaggagaatggcatgaacccgggaggcggagcttgcagtgagccgaggtggcgccgctgcattccagcctgggtgacagagtgagactctgtctcaaaataaaataaaataaaataaataaaagactctgttgcagggcacagggtctcaccctgctgcccaggctggagcgcagtggcacgatcatagctcactgcaacctcaaccgcctgggcttaggtaatcctcccatctcagcctcctgaatagctgggaccacaggtgtgcaccaccatgcccagctaatttttaaagtttttgtagaggccaggtctcactatgttgcccaggctggtctcaaactcctgggttcaagcgatcttccagcctcagcctctcaaagtgctgggattacaggcatgagccactgcacccagccccatttctaaaataataacagtaataggataatggcagccaatgtcatttgaacacttaaaatatgccagacatggtgcttagaactgttagcgtgagtgagcacatttaattttgaaagctatcctgtgaggtaagtcgatactttttttttttttttttttttttttgagacggagtgttgctctgtcacccaggctggagtgcagtggcacaatcttggctcattgaaagctctgccttccaggttcatgccattctcctgcctcagcctccccagtagctgggactacaggcacacgccgccacgcccagccaatttttttgtatttttagtagagatggggtttcactgtgttagccaggatggtctcgatctcctgacctcgtgatccgcctgcctcggcctcccaaagtgctgggattacaggcatgagccaccgcacctggcctttttttttgagatggagtttcgctcttgttgcccaggctggagtgcagttacgtgatcttggctcactacaacctctgcctcccgggttcaagtgattctcctgcctcagcctcctaagtagctgagattacaggtgtgtgccactgcacccagctaattcttgtatttttagtagagatggggtgacaccatgttggctagactggtctcgaactcctgacctcaggtgatccgcccaccttggcctcccaaagtgctgggattacaggcctgagccatcaggcctagcctgatactctgttattcccattttacagatgaggaaactgagactcagagagattaagtggattgcccaaggtcacacaggcaggattgagtccaaggagcctgggatttaaccccagggaccatagaatcatgtcaccttccatagagatacagagagactttgaggcaagagggtggggaaggaaatgaggggctttgaactaaatcaacacacacccttgccatcctgcagaatgagtctggagaacgcctgtttgtttcaccccccagagagcgcattatccccatagctgtcatctggggccatgacactcccactctcctctcttccaggagctagaaaagctaggccttggcgacagcgtggacctgcatgtgtacgagattccggttgagtaccaaacagtccagagactcatccccgccctgtgggagaagcacagtccacaggtgagtggtgccaaggggcggcacttcctcatcaggacttacaggttggcacccttcatgtggaggacttaggtggctttggtcctgatcagatcacgtgaccaatgccatacagccttgtcctcaaaagggcttttcaggccgggcatggtggctcatgcctgtaatcccagcacgttgggaggccgaggcaggtggataacctatactcaggagttcgcaaccagcctgggcaacatggcaaaaccctgtctctactaaaaatacaaaaaattagccgggtgtgatggtgggcgcctgtagttccagctactcgggaggctgaggcaggagaatcgcttgaacccgggaggcggaggttgcggtgagccaagattgtgccactgtactccagcctgggcagcagagcaagacctgtctcaaaaaaaacaaaaaaacccaaagggctatccaggccaagggtagtggctcatgcctgtaatcccagcactttggaaggccgaggcaggaggattgcttgagtctaggagtttgagaccagcctgggcagcatagtgagatcccatctctacaaaaaaatttaaaaattaggcatgatggtacatgcttatagtcccagctactcagaaggctgaggcaggaggattgcttgagcccaggaatttaagactgcagtgagccaagatttttatgccactgcactccagcctgggcaacagaacaagtctcttaaaaaaacaaacaagaccaggcatggtggctcacgcctgtaatctgagcactttgggatgctgaggcgggtggatcaccggaggtcaggagtttgatcccagcctggccaatatggtgaaaccctgtctctactaaaaatacagaattagccaggtgtggtggcgcatgcctgtaatcccagctacttgggaggcggaggccagagaatcgctggaacccaggaaggggaggttgcagtgagctgagatcgcgccactgcactccagcctgggcgacagagcaagactccatctcaacaaagaaacaaaaacactgcattggcattttaacacttgcatagcagctcattatttattgaactaactccgctggatggctagttaacttgtttgcagtatttgattttgataacaagaacagctgcagtgaacagcccttcatgtttcaaattcttgcctgtcttacatggcatacctttttccaagagtgactgcagggtctattctagcagcaagaggtcagaaacaacacaaccccaggcagagctcattaaggatgctgccttttccctggcctcagggggacccctctgagtcccacgggcaggccatgttaagtcctgcccctgtctgtgtgcagctggtggtgcatgtgggggtgtcaggcatggcgaccacagtcacactggagaaatgtggacacaacaagggctacaaggggctggacaactgccgcttttgccccggctcccagtgctgcgtggaggacgggcctgaaagcattgactccatcatcgacatggatgctgtgtgcaagcgagtcaccacgttgggcctggatgtgtcggtgaccatctcgcaggatgccggcaggtagggccctgtggggtgggagtgagtggggatttccctcctccacccactgagcctggtgtagaacaagccaagcgtgttgaccttggcctctttggaccaagcactcagtgtatactaggcacagagccaagtatttgtacgtagcaggtgccgttggttctgctcctgggactcatggatctgcccacttctccccaccatcacggtccccaccaaggcccccagcatctcccacctggacactgccccagcctccatctcagtcttcctccctgctgcctccaccccaacccaagcagtcagtttctgtgttaatttcctggagctgctataacaaatacccacaaactgggtggtttcatataacagaaatgtattgtctaacagccttggaagtcagaagtccaaggtcaaggtggtagcaggactggttccttctggaggtgctgagggtgagtctgtcccaggcctctctcctgcagctggtggctgctggccatccttggcttgtagacacatcgctccagtccccgcccctatcctcacatcactttcttccctttgtgtgtggccgtgtggtcttcttattaggacaccagtcattatatttaggactcatcctaatccagtatgacttttttttttttttttttttttttgagacggagttttgctcttgttgcccagcctggagtgcaatggcgtgatctcagctcactgcaacctccacctcttgggttcaagcggttctcctgccccagcctcccaagtagctgggattataggcatgcaccaccacgcccggataattttatacttttattagagacagggtttctccacgttggtcaggctggtctcgaactcccgacctcaggtgatgcacccacctctgcctcccaaagtgctgggattacaggcatgagccactgcgcccagccgacctcatcttaatttaactaattacatctgcaaagatcctctttccaaataaggtgacattcttttttttttgagatggagttttgctcttgttgcccaggctggagtgcaatggcgccatctcggctcactgcaacctccgcctcctggctcaaacaattcttctgctccaggctaccaagtagctgggattacaggcgtgcatcaccagacccagcaaattttttgtatttttagtagagatggggtttcaccatgttggtcaggctggtctcgaactcccgatctcaggtgatccaccctcctcagcctctcaaagtgctgggattataggcatgagccaccaaacgtggcccaaataaggtcacattctgaggtcccaggtgaacacgaatgttgagggagatgattctattgcaaaaggtcttttataaatttaaatcagggccaggcgcagtggctcatgcctataatcctagcacttcgggaggccaaggcaggaggatcgcttgagcccaggagttcaagaccagcctgggcaacataaggagaccccatctgaacaagtaaaaaaaatagcaggctgagacaggaggattccttgagcttggagttcaaggctgcagtgagctgtgatagcgccactgcacttcagtctgggcaacagagcaagaccctgttggctctaaataaataaatgcatgtgttcctttcctagaccttccctatggctcccattgcacatagaataaaattccaaccctggcccttggcccgcctctccaccccgctctgcctctactcaccccatatccattgcactccagacacatgaaccagcttcctcctgctcctcaaacacaccaagttcactccagcctcagggcctttgaacaccctatggcctctgcccagaacaccttcctctgggaacacctctttccagtctttttttttttttttttgagatggagtctcgctctgtagcacaggctggagtgcattggcgcgatcttggctcactgcaacctccgcctctgacgttcaagtgattctcctgcctcagcctcccaagtagctgggattacaggcgtgcgccatcattcccagctaacttttgtatttttagtagaggcggggttttgccatattggccacaccagggtggtctcgaactcccgacctcaagtgatccacccacctcagcctcccaaagtgctgggattataggcctgagccaccgcgcctggccctctttccagtcttaattccaacacgagtcacctccttgtgacttgtaggcctctccaactccccagaccaagttataccctcccagcaccagcttcctcacttttccctaatctgtgcgcttgtccaactcaaaggcagctattggtcaatgcagttgagtagctgaaggaaggaatgcctggatttaccatcaggatttttgtttttggagacaggatctcgctctgttgcataggctggagtcaagtagtataatcacagctcactgcagcctccatctcctgggattaagtgatcccccgcctcagcctcccgagtagctgggactgcagatggacaccaccacgtccagctaatttttgtattttttgtagagatagaatcttgctacattgcccaggcaggtcttgaattcctgggctcaagtgatccttgtgcctcggcctcccaaagtgctgggattataggcaaaagccaccgcacaccactgagttctttttaaagctaactttttctcttttttaattgaaaactaattgttatttagttgtttatttattttgacaggatctcgttctgtatcccaggctagagtgcagtggcaaaatcacagctcattgcagccttgactttttgggcttaggtgatcctcccacctcagcctcccaggtagcacaaccaaacccagctaatttattttttatttttattttttttgagacagagtcttgctctgtcgcccaggctggagccaggctgcagtattgtggcacaatcttggcttgctgcaacctccacctcccgggttcaagcgattctcctgcctcagcctcctgagtagctgggattacaggtgcccatcaccacacccagctaatttttgtatttttagtagagatagggttttatcatgttggccaggctggtctcgaactcctgacctcaggtgattcgcctgcctcggcctcccaaagtgctgggattacaggcatgagccaccgcgcctggcctaattttattttattttagtttttttgagactgcgtctagctttgtcacccaggctggagtgcagtggctcgatcttgttgcactgcagcctccatctcccgggtcaagtgattctcctgcctcagcctgcagagtagctgggattacaggcacccaccaccacacccagctaatttttgtatttttagtagagatggggtttcaccatgttgcccaggctggtgttgaacttctgagctcaagcaatatgcccaccttggcctcccaaggtgctagaattacaggtgtgagcctccgcacccagctcaattttctttctttttttttaaagacaagagtttcgctcttgttgcccaggctggagtgcaatggcagaatctcagctcaccgcaacctctgcctcccaggttcaagtgattctcctgcctcagcctcccaagtagctgggactacaggtgcctgccaccatgcccagaaaatttttgtatttttagttgagatgaggttttcagcatgttggccaggctggtcttgaactcctgacctcaggtgatccacccgccttggccttacaaagtgctgggattacaggcgtgagccaccgcgcccggccacccagcccaatttttttgtatttttggtagagacaaggtgttgcaatgttgcccaggctggtctcgaactcatggagtcaagggatcctcccacttcagcctcccaaagtgctgggactacaggtgtgagccaccatacccagcttccatcagtctctttataaaattaatttttaatcataggtaactctagaacatatcctcatatgtctaattgggaaaaattctcattccctctctttttccatagcggtccctctgataagtcagacacggaaaccatgaagctcctactgactgacacgtttccgtacatatatacatcacttggcctgctgctttatgattttatcttgttttgctttgcttttacgtggatggagtcacatggcgaaagtcacacttactgagaattctcatccttagttttcatttgtgagcgttcaacatgcatctggcgagttctccatttttttctggctgtaccacattccttgtaaacagattcataggattccatggtgtggataaaccagagtttactaagccactccctgtcagtgggctttaggttgctttctgttttcctgcttttatacataatacgatggggagcatccctgtttgtactttcttgtacccttgtgcagatggttcctgagggtagatctaaaaacgggaaataggccaggcgtggtggctcacgcctgtaatcccagcactttgggaggccgaggcaggcgaatcactcgaggtcaggcgttccagacctgcctagccaacatggtgaaaccccgtctctactaaaaacataaaaattagccggatgtgctggcaggcacctgtaattccagctactcgggaggctgaggcaggagaatcgcttgaacccgggaggcgaaggttggagtgagccaagatctcaacactccactccaacctgggtgacagagtatgactccgtctcaaaaaaataaataaataaaaataaaaactggaaatagggccaggcacggtggctcacacctgtaatcccagcactttgggaggctgaggtaggcggatcactacaggtcaggagtttcagaacagcctggccagcatggtgaaaccctgtctctactaaaaatacaaaaattagccagacgtggtgtggcccacgcccgtaatcccagctactcgggaggctgaagcaggagaatcacttgagccgaggaggcagaagttgcactgagctgagattgtgccactgcactccaacctgagcaacagagcagactctgtctcaaaaaaaaaaaaaaaaaaagccagtggtggtggtgcacacctgtagtcccagctactcaggagggtggggtaggaggatcgctggaggccaggttgcactccaaactgggtgacagagtgagaccctgtctcaataaacaaaaaatggaaataccaggttgtaaagtctgggtgattataattttactagcctgacaaattgccttccacacggggacaaccagcgtgccttcccaccagcaatagctcactctgcccatttccccacatgtgccacagcactgggagttatcaagttttttttgtttgtgtgtgtgtgtgtgtgtgtgtgtgtgtgtgtgttttaaagagacaggatctcactctctcacccaggctgagtgcagtggtgcaatcatggctcactgcagccttgacctcctgggctcaaacaatcctcccgcctcaacctcctgagtagctgggactacaggcacgtgccaccacctctggtgattttttttcatctttgccaacctggggagggaggagagtgttgttccatcttgtgggttgctggtaaggtcttcccttggatttggatgggtgctgtcaccttggtctacggattgcccctctgaccccgttttggtctctctcttacccgccacgccctgcggcttagatatctctgcgactttacctactacacctctttgtaccagagtcacggtcgatcagccttcgtccacgtgcccccactggggaagccgtacaacgcggaccagctgggcagggcactgagagccatcattgaggagatgttggacctcctggagcagtcagagggcaaaatcaactattgccacaaacactgagggacgctcaggtctcctaagacctcatcctgctggggaccccacgaggggacatccaccctctggggtgtggccaggaaaagacaagctcttcagcttggggatccgatctggaagagagattctgatctgcccacctcctcttcctccttctctacaaaagctccggttgattcgagggaagtggtgaaaatttttttttctcccattttcctccctgcatctggggacacagctgccgtgaccagggaggccagcctgggaggtccagatgcccagggagaatcttggtctggtgaatccatgagctgcgataccacggctggggccatatgttcacctgctttcctgtccgttggtgaaggaatttcagaattcattttatatccaagactggcttttaccaaatttaaaagcctctcaatgcgtcctcgaccttgaactgtgctcaacagcctggccctttctggggccaccctgggatatggctggctggctggctttctttctttctttctttctttctttcttgctttctttctttcttgctttctttcttctctctctctctttttttttttttttaaatagtgctagtttgggcacagagtaatttatattccctttggttaaaatgcaggctttttagccaacaacaaaagtgttttccccccacccccactcgcccaccagggtgatgccacttttgcctcctgccctgaaaattggacttaagatgccatgtcttggccaggcgcagtggctcatgcctgtaatcccagcactttggaaggccagggtgggcggatcacctgagatcaggagttcaagatcagcctggccaacatggtgaaaccctgcctctactaaaaatacaaaaattagccgggcatggtgatgagtgcctgtagtcccagctactcgggaggctgaggctggagaatcgcttgaacttgggaggcagaggttgcagtgagctgagattgcacagctgcactccagcctgggtgacagagcgagactctgtctcaaaacaattggacttaagatggcatgtctttgttttagggccaaaaatgaggcccccttgcttaaggcatggggtccgtggccaggcaacggggtgggactgctgccccagatgtggccatgggggtcgtggtcctttcaacaccaagctatgagctgtcgccatggagaccagggccacctgtggaaaggcggattttgtctgcttttgacttttcttttttaatatgtaaaactccacatcagcggaaacccccccctacttctggcctggagcttcagggttttggtgctgggacgagtttgttgttctccttagcggggtggcgcggggggctcaaaacgggggcgcgggggctggagttggcagagctctgcatgtcccggcatgtctgagcaggaggaattccgggcggccaaagggttttatgtagattgcttttggacactcgcccaggagtcaggagttgatttttatctcacttcctggtaaccttgaacttaccaggcagggatgagatgacgtaaacttcctcagatgatgtaagttcagccacatcttgctgcccattagggagagaggacgacccccacagtgaaagtaattgagtgaaatgcacgttctggaaatcagtttctattttggcctggaggaatgtggctatactgcttccctgagtgtgacacagttggaatctaatcttgttggtttcccaacatctaggtttttgtttgtttgtttgtttttatgatagggtcttgttctgttgaccaggctggagtacagtagtgtgatcatggatcactgcagcctctacctcctgggctcaagtgatcctcccatctcagcctcctgagtagctgggactacaggcatgcaccaccacacctggctaatttttaaattttttatacagacagggtttcaccatgttgcccaggctggtctcgaactcctggactcaaactgatcctcctttctcggcctcccaaagtgctgggattacaggcatgagccactgcacccagcccagttctttcttaaaacagctgagagttttgttttcttcagcgttcaccttccttgtctccagttccgatgctggcagtggttcctacctctgttgggtttctagatagtttgggaacggggttgatgggtttctgtgaaacacattttccaagtcttgggctttctctggaggggaaggtggatgctggcgggtgacttgcagtgggcgcctggcagtgggtgtggactgtaactgacaggtggaaatgagtagggacactattgttccctccatgccagcttttttttttgctggaaatgccccctccacacccctggtagctctgtgtcctgagaaatccagagtgtgggagacatcactgcatctgtccccccagcttctgtgaagggaagctgtggcctcttttgaatgtggggaacaactgaagactcaggggtcacccagaggtctggtggaaagcaacttcaggtttcatcttgctctattcctcaaaggtctggtctgtgggcctctgaggagaaaacaggtctagccaagacagggacaaaatggggaaggggatgtgccaggcctgaactgagctaagcacctgccccgggctccacacttccatctttcttttgtcttcatttcacctctgtgtttaaagcactgtgtgacatagctccttagagatataacctattgtctgctcattgtcacgtgtgtgtgtgtcatctttgtattcttgcagtggtttcacatttccttacccagtcaagccagtatcccatccttcctcataatgcacaacatttggctcattttatttttctcattgttattttttatttttattttttgagatggattctcacactgttactcgggctagagtgcaatggcgtgatctcggctcactgcaacctccacctcctgggtttacacaattctcctgcctcagcctcccgagtagctgggattacaggcgcccgtcaccacacctggctaatttttgtatttttagtagagatgcagcttcaccatgttggccaggctggtcttgaaatcctgacctcaggtgatctgcctgccttggcctcccaaagtgctgggattacaggtgtgagctactgcgcctggccaagttttttacaaatatttttcttttggtggaactcatctgtgcactctctggtgtgtttttccacctttgttgggtcttggcttaaaatatcctcatgtgggctaggtgtggttactcacacctgtaatcctagcactttgggaggttgaggcaggagaatcccttgagccaggagttcaagaccagcctgggcaacatagcaagagatcccatatctaccaaaacatacaagaattagccagatgtggtggtgcatgcctgtggtcccagatactcaggaggctgaggcaggaggatcacctatgcctgggaggttgaagccccagtgagccatgatcacaccactgtagtccagcccgggtgacacagcaagactctgtctcaaaaaaaaaaaaaaaaaaaatcctcatgcaagaagggaaggaccaagtcccattccctcttgcctcattttcagagcctggggtaggggctacaggtggcataggaagggtctgcaaggtgggtgggacttggcaggtgttgggaagaggaataggggtggcaagtgtcaatggtgaaaagacaggctgaggggtgtggtgggaaggctgggggagaaaggtgagaagtgattgggggggcttccctgatgagtcctcatggagggtgctgaggcagggaacaggggtgcagggacagtgatcagggcacctggtaccctgaccaacttgatgatggcatctcttttaagatgcccaagtctgcgcacttttattcctttattcggcccctagcaccccctccccaccccaaagaaggtcagttgcatgcgtgtggggatgtagctcaaaaaagaaataagatggagtggaaaggaaagaaaggaagaagcaggaattcaaggtgggtgggctgagcttggggccacctagcccacctgctccaatcaagggctggaacaaacctgaggccacttggagaggcagggctgggcagggacagggggtgggggccgaaatcacagcttccccatcagagccagatgtgtgaaggaaatgtcccagatggcagtagtttctcggcaaggaggggaatcctggagatggttcatgtctgtgatcccagtgctttgggaggctgaggtgggaggattgcttgagcccgggagttcgagaccagccctgggcaacatggcgagaccccatctctacagaaattaaaaaaaaaaattagccagttgtggtgtcaagcacctgtagtcccagctacttgggaggctgagttgggaggcttatctgagcccaggaggtgaaggctgcaatgagccatgattacactactgtaccccagcctgggcaacagagcaagaccctgcctcaaaattaagaaaaaaaaaaggggggccaggcgcagtggcttatgcctgttatcccagcactttgggaggccaaggcagactgatcgcttgaggccaggagtttgcgaccagcctggccaacatagcaaaaccccatctctactaaaaatacaaaaattagtcaagagtggatggtgcgtgcctgtaatcccagctacctgggaggctgagacaggagaattgcttgaacctgggaggcagaggttgcagtggtgtgagatcacgccactgcattccagactgggcaacatagcaagactctgtcacaaaaaaaaaaaaaaaaaagaattccctgctctgcttttctgctcgttgctggcatagaaacatctagaacagaaagtatccactctggggcagatgggagagctggaaaagtagattcaagatgccttttagtcttggaagtttcttccaggaagcaagaccagctggtatgtttacacctgcactccagtgccctggggaggtgaccaggtggagggggatggctcatggaaatctgtcccgcacagctggcccccttttggctgccactgtctagactgttggcctttgacctctctgcctcttgtggcgtctgaacctagacgtcccttttggagacagctggacaaagccctattctccgcagccccagcctctatcctgaggcctctgggagctgcgtgacggccagcatggggtgctgatcatggtcaaggaggcaggtctttgccaggttgccccatgcagccacccatcctcagcatcctaacttgagggggcaggagagggctttgtttttataatccggattaaatttcccttccctgggcacaagtgcctcatgagggcccggggctgctggttgggagggaaagcatccccgtttttgcagtgaggaggccggccgagggctggggttccacttagacccttggcagaatggctgttgaggggcaggcgctgcccagtgcccacgtctggaaagctaattcccgggtggacgctgaacatacctgctgagagactctgtcccctggtttccaggacagttgtcacaagctgagtggggggggactcccaggacttgagggacccagtcccaccccaaactgctccccctcccccaaattccctttctcctcctgctctttctccccgctgtgcctcccccagttacccacagaagtgcctgcctctccagcgctcacagaacacacaaaaagggacaggaattggtcactgggtagtggccgtggctcctgacgatccagaccagcgtctggcccaagccattcagaggtggggtctggggcctgggggttttgtgtcgtgacactttgtctcaaggagattccacatagggatttgaattaggctttctgcttgccaaggcctgtggcatctgagcctggctgagggccgggcaagcctcccctgagcctttggaagccgagttcactctctgcctgcccaggggagcaccggcttggttctgggggctcctctaacatctcaggtttttatcttgtcttaaatttctttctaggaaaaaacccttccctgccaaaggtgactgtgttttctgccgccgaaggagggcccggtccctccaggctcagtgtggcttctccctgacccccgccctagaacttttgccagtgccttttctgaaactcctgtgtcccgggccccccaggcggagaaggatatgccggattctgcctggggctgggctctaggagaccccaaatttgacaccacagaaagcaaataaaacacttgaaatacgcatacatttcctgtgtgtccttttgtggggctggagttcagctgggtgcccggggatagaggggaccccgtgtcactgggtttctattctcggtggtgctgggcccagggcagctggtgaccatgtgctgagtgagcgagaggaggggaattctgcctccagtggtctccttcctcaaaatcagaggcctggcccagcgcagtggctcacacccggaatcccagcactttgggaggccgaggtgggtgaatcacctcaggtcaggagttccagaccagcctggccaacatggcgaaaccccgtctctactaaaaatacaaaaattagccaggtgtggtggcacgtgcctgtaatcccagctactcaggaggctgaggcaggagaatcgcttgaacccgggaggcggaggtcacagtgagccaagatcgcaccactgcactccagcctgggcaacagtgtgagactcagtctcaaaaaacaacaacaaaacccgcggacctttgttccaacacacagggaggttgaggaacttgcctgtggtaacacaggcactggggtttgagcgatgatctgcatcaacctccagggcatacaaaatccccatcatggctgggcacggaggctcacgcctgtaatcccagcactttgggaggctgaggccggtggatcacctgaggtcaggagttcaagaccaggctgaccaatatggtgaaaccctgtctccactaaaaatacaaaaattaggccaggcgcagtggctcacacctgtaatcccagcactttgggaggccgaggcgggcggatcacaaggtcaggagatcaagaccatcctggctaacacggtgaaacctcgtctctactaaaaaatacaaaaaattagccgggcacggtggcaggcacctgtaatcccagctacttgggaggctgaggcaggagaatggcgtgaacccaggaggcagagtttgcagtgaaccgagatcgcgccactgcactctggcctgggcaaaagagcgagactccacctcaaaaaaaaaaaaaaatacaaaaggtagctgggtgtggtggcaggcacctgtaatcccagctacttgggaggctgaggcagcagaatcacttgaacccggcgggtggaggtttccgtgagctgagatcacgccactgcactccagcctgggcgacagagcaaacaagactccacttcaaaaaaaacaaaaaatccccatcattctgacaggggatgccatgccattgccacctttacagacagggaaactgagtttccaccagttgaagccccttgtcccctatgtcacggccagggagagtaggggtgggaatgtgaacccaggcgggcttctctggagcggagggccttgaagaacacaaatggacatgttcattccctacgcctgtcctcagcaggaatgaagacaccctggtctctggctctctgagaataaacttttgacaccaaagggacttggacaacagttaggaagatgtcctggagcaagtggaccccgtgggttgggggaacttcttggactcacagaggactgagggttcttgcacccccagtggaggtattcatatctgggtggtctttcccatagggtcgactcttattattgttatttaatgtagagacagggtcttgccatattgcccaggctggtctcaaactcctgggcttaagttctctacctgcctcggcctcccaaagctctggaattccaggcatgagccaccatacccgtccctttgctgtcttgagccttagtttacccatttctcgtggggcttttgtggcaattcaatgagattctgcttttacagcccttaacttggagcctggtgccctgtcattgctcagtaaatacaatgatcagggtgtgggctctcgcttataatcccagcactttgggaggccaaggcgggtggatcacttgaggtcaggagttcgagaccagcctgggcaacatggtgagaccccccccccccatctctacaaaaaatacaaaaattagacaggtgcagtggcgcacacctgtagtcccagctactcaagaggctgaggtgggaggatcacctgagcctggggaggtcaaggctgcagtgagtggtgatcgtgccactgcactccagcctgagtgacagagtgagaccccatctcaaaaacaaaaacccggtcgggtgcggtggctcatgcctgtaatcccagcactttgggaggcaaaggcagatggatcatttgaggtcaggagtttgagaccagcctggccaacatggagaaaccccatgtctactaaaaatccaaaaattagccagccatggtggtaaacacctgtaatcccagctactcgggaggctgaggcaggagagtcgcttgaaccagggaggctgaggttgcagtgaactgagatcgcgccactgcactccagtctgggtgatagaatgagactccgtctcaaaaaaaaaaaaaccccacaaaataaatacagttaccatcacctcctcttccaggaagccctcctggctacctaggcatctcctctgactcctacagctgcctgggtgtccccattgtagcactctgggtggtaattgacagcctctgtgagagggtggatgggtatgtgtggggccccctctgtgtcttctgtgcccagcacagtgccagggacacagtagggaagcaataaactgctgggaggagaggtgagtgctgtgggtccactcctgaggccagccaggggctcagcaaggcaccaatgcctcctcccaggagtgaaagatgctggaatcaccaggctcctcctgcagtctggggtccccacctaaggaggcccctcaccccgtggctgtcccagtcattcaggaagtgtccactgtgggctgagccctggactggggacacagcaaggatcaggcagctgggagtacagcctggaggtccccccttgggatgagggctgcacaggcagttaaagggtccaaggatcatcccaggatatggctgagaggctgcaagaggctccatcccctagaggccccctccgccctcgcctgggtgctcccagccttactcaaaggagcaggtcggcccggtgcgttgtctcacacctgcaatcccagtgctttgggaggccgaggcaggcggatcacttgagcacaggagttccagaccagcctgggcaacatagcaagattctatctctacaaaagtaaaaataaatcttataaagtagctgtggactgggcacagtggctcacacctgtaatcccagcactttgggagaccaaggtgggcagatcacctgaagtcaggagtttgagaccagcctggccaacaaggtgaaaccccatctctactaaaaatacaaaaattagccaggcatggtggtacacatctgtaatcccagctactcaggaggctgaggcaggagaatcccttgaaactgggaagcagaagttgcagtgagctgagatcgtgccactgtactccagcctgggtgacagagtgagaccctgtatctaaaaaaataaaataaaaatgaaaagatgaggatcttggcctccattcttgcccttccactccattccaactgctgagcctctcacaccctctgtggctccctttcgcctacaggaaataggatttctgtactgggcatttgaaccccattcccttgtttctgctgacccccagcagtctcaatatcccctacttcctcttcccagaaccaccctccccaaagcccttatcgatgcttggaggattcctatgcatccctcaaaatccaaggtttgggaaagatgctgcagtggtctcaagacatcctcagtgtgatgacagcctggggtgggggtaagggggcaaagtacagcaccagaaatcccaactgagtccccccacacgtcttccaccttcccaccctctctttcgggttctggctccctgcctccaggcaatcaccagtttttaccaggagtgcctcagacctgcccggacatgtccaagtcccctagaagcagggaggggtgggtgaggctgtcacctctcccttccctgtatggtgctgataagggcgtggggaggcagagacaggcagagatagacatgatgagagacaggcagaaatggagggagagccagggagagagagacacaaagagaaaaagtggaaattctccagatattttgtttagggtgaggacacggagacacagagagggacttagccagctgaggatgacgatttgggatgttaggtcacccaggtgctgtgctgtgtaactcaggcacagagctgccctgttccgagcctcagtttacccctgtgactcagagcagatctccatacccccatcacagggctgtgtatccgagctcagccagagcctggcatgcagtaggtgcttcataaatacacactgtggacagtagaattatgatgggagcgagcgtgtgaactgggttgctaatgtggagcgtgaagagggaggcccagggttactcggccaatgggttccgggcagcaagcacgtgggggaagcctcagctgaccacttcctggccagtttatgcaggaactcgcacagccggtccctgaggctgagcccaccacttccgccccccatggtcccagccctgctgactcatactcagctgccacggtccgctttccctgctgagcacgggggtgggggcgggggggaagagggggagggaagggcacctgaccgaggccagaggcccagaaaggacagaaggtcatggctggggagaagcaggcaggagaaccgagtcttggccttaactggctggcaacgtaaaacctgccctccacaaggacaagatgaaaacttggggatttggaggggacaacaaattagactcaatcacaatttcaaacttttggatgtcaatatatccatcaagaaattgaaaagaggcctggcatggtggccgatgcctgtcatcccagcactttgggagaccaacgtcggaggatcacttgaggtcaggagttccagaccagcctgggcaacgtggtgagacccggtctctacaaaaaaatttaaaaattagctggacaggggccaggcgcagtggcttacgcctgcaatcccatcactttgggaggccgaggcctggatgacagtgagagactctgtctaaaaaaaaaaggacaggtgcggtgcttcgcgcctgtaatcccaacactttgggaggccaaggcagatggatcacctgaggtcaggagttcgaaaccagcctggccaacatggtgaaaccccatctctactaaaaatacaaaaattagccaggtgtggtggcgcatgcctgtcgtcccagctacttgggaggctgaggcaggagaatcacttgaacccgggaggcagaggttgcagtgagccgagatcgtgccattgcactccaggctaggtgacagacagaaactcttgtctcaaaaaaaaaaaaaaaaaaaaacccaccagagataaaaatgggcagcagatgacattgtttacataatactgaccacaaacttgatgtcctaaaagaacagggacttctctcagagttctggaagccagaagtccgaaatcaaggtgtcacagcaggactggttccttctggaggctgtcaggactcagaatgtgatactccaaagtatggctccttggcaaaaactttgtggtttttgtttttagagacagggtcttgctctgtcacccaggctggggtgcagtggtacaatgatagctcactgcagcctctacctcctgggctcaagcaatcctcccacctcagcctcccaagtagctgggactacaggcatgcgccaccacacctggctaattacttttatttttgtagagatgaggtctcgccgtgttgcccaggctggtgtcaaacttcttcttcttcattttttgtttttgagatggaatctcgctctgttgcccaggctggagtgcaatggtgtgatcttggctcacagcaacttccgccttctgggttcaagtgattctcctgcctcagcctcccgagtagctggaattacaggcatgtaccaccgtgcctggctaattttgtgtttttagtagagacggggtttctccatgttggtcaggctggtcttgagctcctgacctcaggggatccacctgcctcagcctcccaaagtgctaggattacaggcgtgagccaccgcgcccagcgaagacagttattttaaagtatttgtctagtgagtctgatgtgtgggcttccttagggatggtttctgtctgttaattttgttccttaaaatgcgccacactttgctgtttctctgtatgcctagtgatgtttttgttgttgaaaagcgagcatttgaatattctaaattatggtaactccagaaatcagattctccaccttcctgagagttttgtgatttttgtttctgtttttaattatggaaggcagtagccatctctttgtttagatagttttccaaaccgcttttttttttttttttgcaaagactgtattccggccgggcccggtggctcacgcctgtaatcccagcactttgggagtccgaggcaggtggatcacgaggtccggagatcgagaccatcctggctaaaacggcaaaacccccctctctactaaaaatacaaaaaattaggtgggcatggtggcgggcacctgtagtcccagctactcgggaggctgaggcaggagaatggcgtgaacccgggaggcggagcttgcagtgagctgagatcgtgccacggcactccagcctgggcgacagagcgagaccctgtctcaaaaaaaaaataaaataaataaaataaataaataaataaataaacctgttccccaaatatatatatgaaattaaaacatgcgtggtcatgatcaagttctaattacagacaaagacttccttgagattggggagaacctgccttggactacggggaccacttcaactctcttgggaatgatttttctttaggtgggtgctggataggggtgtttgtgattttattattaatacttttgtgtgtgcctgaaagatttcacaatgacaaataaaactgagaggaaaaggtttggcagttccccattaagttcaatacagggttactctgtgacccagtaattccactcctcagtagagagccaagtgaaatgaaaacaggtgttcaaacaaaaacgtgtacacccacttttacagcagcattcttcatcaaggcgaaactacagtacaaatattgtaagattccatttctgtgaaatgttccgaataggtaaatctataaaggcagaaattaggccaggtgcagaggctcatgcctgtaatcccagcactttgggaagccgaggtgacaggatcgctggaggttaggatttgaagaccagcctgggcaacatagcgagatcccatctttacaaatttttttaaaaattagcaaggcactggctgggtgaagtggctcacgcctgtaatcccagcactttgggaggccgaggcgggtggatcacctgaggtccggagttcgagatcagcctgggcaacacggtgaaacccccgtctctactaaaaattcaaaaattagctgggcatggtggtgcatgcctgtaatcccagctactcgggaggctaaggcaggagaatcgtttgaacccaggaggtggagactgcagtgagtcgagatggcgccattgcactccagcctgggcaacaagagtaaatctccatctcacaaaaaaaaaaaaaaaaaaaaagcaaggcacagtggcatcaggctggggtgggaagatcacttgagcccagccattcgagaccaacctgtgcaacacaggaaaaccccattctacaaaatagtaaaaaattatcagggcatggtggcacatgcctatagtcccagctactcgggagagtgatgggggaggatcacttgagcccaggaggtcgaggctgcggtgacctatgattgtgccactgcactccagcctgggctacacagccagaccctgtctaaaaagaaacaaaacaggcaggacgcggtggctcacacctgtaatcccagcactttgggaggccgaggtgggcggatcacctgacatcaggagttcgagaccagcctgtccaacatcgtgaaatccccctctctactaaaatacaaacattagccgggcatggtagtgggtgcctgtaatcctacctactcgggaggctgaggcaggaaaattgcttgaacctgggagatggaggttgcaatgagccgagatcgcgccactgcacgacagcctaggcgacagagcaagactccatctcaaaaaaaaaagaaaaagaaaaaaagaagaaactctcattgatggagtgttcattgatggagcactttttgggagtgggttgacatgctcacaggtgtttttaacctcacctcgtctctgaagaggtgcagataaaagtcacctggtgaggaaaatgcctttttaaaaacaatttttagagggccagcacggtgactcacgactgtaatctgagcaatttgggaggccgaggtgggcggatcacttgaggtcaggagttcaaaaccagtctggccaacatggtgaaatcctgtctctactaaaaatacaaaaattagttgggcatggtggcacatgcctgtaatcccagctactcgggaagctgaggcaggagaatcactttaacccaggaggtggaagttgcagtgagccaagatcgcgccagtgcactccagcctgggcaacagagcgagactctgtctcaaaagaaaaaaaaaagagatggggtcttggggtctcactgtgttgcccaggctggtctccaactcctggcctcaagcaatcctcctgctttggcctcccaaagtgctaggattacatgcctgagccactgtgttcagccagggtgtcccttttctgagactgcattctttccaccttgcccaagtattgcaggagaaccacaggccccatgctgtgctggcgaaaatctcatctcatgctggcctgttagggtggccatatcctctcatttcagaggctctgagggagatggaacaggctcagcggctggctgcttggggctctaaccccagccctgctgtcttctggctgtgtggccgtgacgagcccacctctctggcctcagtttgtcatctgtgaaatggacataatctatccaccacatcaggctgtataaagattaggccaggtgtggtgcctcacacctgtaatcccagcgctttgggaggctgaggcaggcagatcacctaaggtcaggagttcgagaccaacctggccaaaatggtgaaaccctgtctctaataaaaatacaaaaattagctgggcatggtggcatgtacctgtaatcccagctacccaggaggctgaggcaggagaatcgctggaacccgggaggcagaggctgcagtgagccaagattgcaccactgcactccagcctgagtgacagagcgaaactccgtctcagagaaaaaaaaaaaaaaaaaagatatgtccaagtcctaacgctcagtatctgtgaccttatttggaaagaaggtctttgcaaatgtaattaaactaaagatcttgtactgagatcattctgaattaagaatggacctgtggctgggcacagtggctcacacctgtaatcccagcactctgggaggctgaggtgggcagatcacctgagatcaggagttcaaaaccagcctggccaacatggcgaaaccccgtctctactaaaaatacaaaaaaaaattagctgggcgttgtggtgcacacctgtaattccagctactcgggaggctgaggcaggagaatcacttgaacctgggaggctgcagtgagccgagattgcgccactgcattccagcctaggcaacaagagtgaaactctgtctcgaaaataaaaacataaaaagagtggacccatggccaggcacagtggctcatgcctataatcccaacactttgggaggccaagatggaaggatcgtttgaactcagccgtttgagaccagcctgggcaacatagtgagacccctgtgtctaaatacaaacacaaacagaaaacaaaaagaacccgggctggctgcggaaccccctagatggcacaggcacatcctggctttcgaggacagtcacgagcatgagacagcatttcttcttgtcctcggggcctgcaggaagtttttaagtaatctgcttttgtgcctcttccaaatctcctcctatgaccctgtttaccttacatcacaagaaacaatcaataaaagtggtttgtgttcgtgagtgccgtgtgtttgacaaaggcgttgataactgagagctggtagtggaggggggagattttgggagattggggccctgccaggtggacggactggcctgacctccggcccctgtgctctgtttacttccatcccagctccacctctggggacccatggaagctgtcggtgaggaacacaggatccgacctgctgagctcatctctggccacctgcctgcatccgccccatctctcctctcagcttggccatgaggcgggctatgaggtcattggttaaagatttggggaagcagagccaggcgagtggccagatgtggtggctcatgccatcacaggatcccagcactgtgagaggacaaggaaggaggatgcttgagctcaggagttcgagaccagcctgtacaacatagcaagacccccgtctctacaaaatataaaattagccagttgtggtggcacgcgcctctagtcccagctactcgggaggttgaggtgacaggatcccttgagcccaggaggtcgaggctgcagtgagtgggtaacagagccaaaccctgtctctaaaacaaacaaaaacagaaacaaaaagtacactacttactgtcctgcttctcaccattccagcctggtagtccttttttttttttttgagacagggtcttgctcagttgctcaggctggagtgcagaagcgtaatcacagctcactgcagccttgatctccaaaaagactaccagcttggctgggtgtggggactcatgcctataaccccagcattttgggagccagaggcaagaggattccttgagccaaggagttcgagaccagcctgggcaacacagtgagaccctatctctaaaattttttttttttgagatggaatttagctctcgttgcccaggctagagtgcaatggtgcaatctcagctcaccacaatctccacctcccaggttcaagcaaaattctcctgcctcagcctcccgagtagctgggattacaggcatgcgccaccatgcccggctaattttgtatttttagaagagacggggtttctccatgttggtcaggctggtctcaaactcccaacctcaggtgatctgcctgccttggcctcccaaggtgctggaattacagacatgagccaccgtgcccagcctaaaaaaaatttttttaaaaaatagctgagtgtggtggcacatgcctatagtcccagctacccaggaggctgaggtgggaggattgcttgagcccagcagatcaaggctgtagtgagccaagattgtgccactgcactccagcctgggcaactgagcgagaccctgtctcaaaaaaaaaagaaaaaggaaaaagaaaaagaaaaaaaaaggactaccaggtgttttttttttttttttttttttgagacggagtctcgctctgtcgcccaggctggagtgcagtggcgcaatctcggctcactgcaagctccgcctcccgagttctcgcctttctcccacctcagcctcccgagtagctgagactacaggcacccaccaccatgcctggctaatttttttgtatttttagtagagagggggtttcaccgtgttagccaggatggtcttgatctcctgacctcgtgatccgcctgacctcggccttccaaagtgctgggattacaggcacgagccaccgcgcccagcctggtgtccttatttcttgggaaaggatacagagggtcagagaggcgccccagcttgtgcaggaatgcattcctgagatctggcctggccgtggtcactggagtgtttactctgcttacagggtctggtgtagtgggggatggctgggtaggaacgtgcgggctataaagccagaccccaggtgtcagtgcggttcagaaagcaactagcacagccatgcccaggccaggacccgtgacacagcgatgctctcagatgctgctgatgttacagatgttgttgggggcaccctgagggggcaccctgactctgcaggtgagaaccttctggggttcctaggaccctcggacaagcactctgatccggatgactccaggtcccaggagttgcagaaacgccaccaggaccttcagagcaccagttagacaaggagagccaggaggagctgggccccaacctcatccaaaagcacaggtgagctctgagacctccacccccaggacagcccccacgtctattttctttttctttaaagatgttcttatttgggggccaggcgtggtggctcatgcctgtaatcccagcactttgggaggccgaggcaggcggatcacctgagatcaggagttcgagaccagactggccaacatgacagggtgagaccccatctttacaacaaatacaaaaattacccaggcatggtggcacacgcctgtaatcccagctactagggaggatgaagcaggagaattgcttgaacccgggaggcggagattgtagtgagttgagatcgcacaactgcactccagcctgggcaacagagcgagactccaatccaaaaaaaagaaaaaaatcccctaggacagggctgtggctgagaccctgagggctggaggcttggctggccttgcacagcagcgggtgcatgctggggtggggagaggcctggagaccctgtgactccactgggggccttgctgtgtgaccccctagtgagtccttgtgtctcttacccacgcatgcctgtcacatgcagacacccacacacacccagtatctgccggacagggcagcccttcctctccgcagccaggaagctggacataggcacaagggctgacgcctggggccaggaatcctgcctgagcattaggagaaggtctggaaccccagggggaagggcactcctggggcatcccctgcccctctaccatctggtggctggactctacaccagcctgccctgctctaaaaccccagctcctcaattctgtgccacctcctctctgggcccagacaagagcagattcatccctgccccaaaggaaccaccagtcttgggtcagcagagctgggcacagacacttccagtgccgtggggctgtaactgtgataggtctgttgctccatgcacttggcaagtcaacagctgagaaaacaggttgcaacatggaaagagttttaatccgaccggcgtggtggctcatgcctgtaatcccagcactttgggaggctgaggcgggtggatcatctgaggccagcagttcaagatcagcctggccaaccaggtgaaacctcatctctactaaaaatacaaaaattagccaggcgtgatggtgcgcacctgtaatcccagctacttgggaggctgaggcaggagaatcaattgaacctgggaggcggaggttgcagtgagccaagatcataccactgcactccagcctgggcaacagagcgagagactgtctcggaagaaaaaaaaaaaaaaaaaggctgggggcagtggctcatgcctgtaatccccacactttagaggcagaggccgacggatgacttgaggtcaagagttcgagacctgcctggccaacatggtgaatcaccgtctctactaaaaacacaaaaattagccaggtgtggtggcgcatgactgtaatcccagctactcagtaggctgaggcaggaggcggaggttgcagtgagccgagattgtgccactgcactccaacctgggggacagagagaaactccgtctcaaaaaaaaaaaaaaaaagagatttaatcctagggccacccaatgaggagataggagggaacctcaaatccatttccaggaggaggagtttggggccatataaatgtatatatacaaatatatatatttttttaagatggagtcagccggccgtggtggctcacgcctctaatcccagtactttgggaggccgaggccagcggatcacaaggtcaggagattgagaccatcctagctaacacggtgaaaccccatctctactaaaaatacaaaaaaaaattagccaggcgtggtggggggtgctcatagtcccagctactcaggaggctgaggcaggagaatagcatgaacctgggagctggagcttgcaggttggagtgcaatggcatgatctcagctcactgcaacctccgcctcctgggttcaagcgattctcctgcctcaggctcccgagcagctgggattacaggcatgtgccaccacgaccggttaatttctgaaattttttagtagagacagggtttcatcatgttggtcaggctggtctcgaactcctgacctcaggtgatccgcccgccttggcctcccaaagtgctgggattacaggcgtgagccactgcacctggccaggggctagagttttaatttttaaggattttggagtgggctgaagtgtggaggtcattgcttggtgaaagagtgcaggaggtgaagtcacagacagtaagaaactgtattctcatgcagattccgttcctctgtggggtcttcacactggtgggtgtcattggttaaggatttcaaaaacatcttaagaaattcttctaaaaagtcttatgattctaaggtcggaaatcacatctatagcaaatggtcggtatcaggtgctacaagcaacttgcggtcacaaggaagtgggtcaaagtgcagcctgattagtgcttaattataactaagtttctgtccagaattctttttttttgagacagagttttgctcttgttgatcaggcggaagtgcaatggtgaaaacttggctcactgcaacctccgccctctgggttcaagcgattctcttgcttcagcctctcgagtagctgggattacaggcatgtaatcccaccaccaagcccagctaattttgtatatttagtagagacagggtttctccatgttggtcaggctagtctagaactcttgacgtcagatgatccacgtgcctcggcctcccaaagtgctgggattacaggcgagagccaccgtgcccggcgcagaattcttttttttagagatgaggtattgccatcttgcccagacttgtctcgaactcctgggctcaaacaatccacccacctcggcctcccaaagtgctgagattactgacataagccaccatgcctggcccccagaattatgaatcctgtgaggatggcttcaaggtgagcgctgagccagacaaaaggatggggtttgggagcaccctgcttagactggaaagataatgttggagaagacttcctggaagaggggctttttgcgtagagttttgaagaatgagtaggagttctccagaggaggatgagtaactgcaataacacccagtttatcaagtgcctcctatgtgtctggccctgtgctttacccctcatttgaccacctctccagtgagagtctcagtcctttttttcctggtgaggaaacaggcatggcagagaggcatgacacatcaaggttgcccttcctggctccatctagcccgttctcctctgcttcctttgtttttcaccatctttagcctttgaccccaaccaaaaagagaagagaggaaatcccatgggcatagacagccacctcttaaactcttgtctggaatttttcacatagtaacaatgtctttttttcctccaaaaagactcccaggctggaatggtgtcctcatatcgaggaagaggatactgaggcccagaaatgtgccctagctttactaggagcgcccccacctaaagatcctccccctaaatacacccccagaccccgcccagctgtggtcattggagtgtttactctgcaggcagggggaggagggcgggactgagcaggcggagacggacaaagtccggggactataaaggccggtccggcagcatctggtcagtcccagctcagagccgcaacctgcacagccatgcccgggcaagaactcaggacggtgaatggctctcagatgctcctggtgttgctggtgctctcgtggctgccgcatgggggcgccctgtctctggccgaggcgagccgcgcaagtttcccgggaccctcagagttgcactccgaagactccagattccgagagttgcggaaacgctacgaggacctgctaaccaggctgcgggccaaccagagctgggaagattcgaacaccgacctcgtcccggcccctgcagtccggatactcacgccagaaggtaagtgaaatcttagagatcccctcccaccccccaagcagcccccatatctaatcagggattcctcatcttgaaaagcccagacctacctttgagcctcagttgccccatctgtgccctgggtaggaatatcctggatccccttgggtctgatggggtagccgatgcctgatttgcacccacaacgtgggaggttataacctgtccccaagttgcaaatggggaaactgaggtacagggatgccagggaccctcctgaatgtgcacagcacctgggaaacccggggacggggtcgggcgtgcggtgtgggcatggtccctgacctgggctggggccaggatccaagagaaacaatgggggtgtggtgcatggatagaagtttgtgatgggcagagccagctggagctggttctgaatctgatgaaatcgcttgtcaaggcactgctaaagtcacatgcaacgagcgacttgttaggggaggaggagagtattttccccatctctgtgccctccatggaggctccaggggtgcagggcactggatgaggtctgggctgtggtgggacccaggagggggcaggcagaggggcacactcttagcccgccctaaacccatctgtgccgtgtgactccggcaaacctctcacccttgctaagcctagcaactaggttaaggcaccctcaaaccccagtctccccagtctccctaacacttgtaccagcctgaggggctgtgattcctagaggctcagtagtctggaatgtgatgggtttggcactcttcatttctcgggattacacctgtaatcccagcactttaggaggccaaggtgggagcatcgctttaggccagaacattgcagcctgggcagtatagcgagaatccatctctaccaaaaatgtttaaaaaaaattagccagacatgatggtgtgtgcctgtagtctcagttattcaggaggctgaggcgggaggagcacttgaatccaggagattgaggctgcactgagccatgagtgccccactgcactccagcctgggtaacagcaagaccataataaataaataaataagtgaagcaagtaagtttttgactgccagaagaaaagcagagccatggttggaatctcaggctgcctgaatatcagatatacattaattccttcaagtatttactaagcacctattgtgtgccaggcacagtgtcaaccaagctaagattctaagtagggaatatgaatgatacacaaggaaataaaatagggtgcttcctattttaggcaggctggaaggaagaggaggagccagccatactgagattcaggagattcaaggggagaaatgcccttttttttttttttttttttttttttgagagggagtcttcctctgttgcccaggctggagtgcagtggcacgatcttggctcactgcaacctccaccgccccgattcaagccattcttctgcctcagcctcccgagtagctgggatcacaggcgccagccaccatgcccagctaatttttggtatttttagtagaagcgggcgtttcaccatattggccacatatcggccaggctggtcttgaactcctgacctcaagtgatccacctgcatcggcctcccaaagtgctgggattacaggcgtgagccaccgcgcccgcacggagaaatgctcttggtaggggaaataacttgtgcaaaggcgccgccgccgtggtgagatccagcttggcgtgttaggggaaatgggcaccctcgttcctggaaaacggtaggcctgtgggtgaccagcttccctatctgtcttcccacagtgcggctgggatccggcggccacctgcacctgcgtatctctcgggccgcccttcccgaggggctccccgaggcctcccgccttcaccgggctctgttccggctgtccccgacggcgtcaaggtcgtgggacgtgacacgaccgctgcggcgtcagctcagccttgcaagaccccaggcgcccgcgctgcacctgcgactgtcgccgccgccgtcgcagtcggaccaactgctggcagaatcttcgtccgcacggccccagctggagttgcacttgcggccgcaagccgccagggggcgccgcagagcgcgtgcgcgcaacggggaccactgtccgctcgggcccgggcgttgctgccgtctgcacacggtccgcgcgtcgctggaagacctgggctgggccgattgggtgctgtcgccacgggaggtgcaagtgaccatgtgcatcggcgcgtgcccgagccagttccgggcggcaaacatgcacgcgcagatcaagacgagcctgcaccgcctgaagcccgacacggtgccagcgccctgctgcgtgcccgccagctacaatcccatggtgctcattcaaaagaccgacaccggggtgtcgctccagacctatgatgacttgttagccaaagactgccactgcatatgagcagtcctggtccttccactgtgcacctgcgcggaggacgcgacctcagttgtcctgccctgtggaatgggctcaaggttcctgagacacccgattcctgcccaaacagctgtatttatataagtctgttatttattattaatttattggggtgaccttcttggggactcgggggctggtctgatggaactgtgtatttatttaaaactctggtgataaaaataaagctgtctgaactgttccctgtggtgtccaggataagggaaggtgaccttgagaagatcctcctctccctgacctcagtttctctaggagacctgggagggggtaagtggaaaggctcaaggaatgagtggcaaggtgttctcggagatgccaagccattggaaggtgcttacgacacctgtgggctctaagggcagccttggccattcctgactccctgactctctgtctctatttctctatctccttattgctgtttcttttttctttttattttttttagacggggtctcactctgttgcccaggccgaagtgcagtggcacaatcacagctcactgcagcctcaaccacccgggctcaatcgatcctcccacctcagccacctgagtagctgggactacaagtgcatgccatcatgcccaactaacttttgtattttttgtagaggctgagtttcgccatgttgcccaggctggtgtttctgttttggaaacagctgagaccccatacctttttaagtctcagcttccctccatctttcctcattcctcaaaacttctctctttggggtctgaggcagaggatctgtctctgtctttgtctctatcaccatcctgttgctctccccacttgggagtcacctttccaaacacaggcagctcagagccaagtctatctgcaaccaagtgccttgttttgtggtactgtccccaacctgaggggttagtcccatcacccctcctgtttgtggcacttccatgttagtgacacctcattctttcacatataaagagtagggagaaacaaataagttgtgaagaatattttcatgcacaccacatctcccaggttatatatacttcctgtttaggatgttggaattttgaggtgtgctgagtccagccccctctccacaccaaactgcctgcccatcctgaatctctgagaggaatggcgatgggtgtcttgagggacagagtacccacttccagcagtgaggtgtatctgctgggaatgccatcacccacaggccaacctgaatgactgcaggttccccttaacgtattcagtgagtgcccactttatgccaggccccggacacagctgtaaaaagacacacaaggaccaccccactttgcggagcctggttgagtgaaggggacaaatgagtaaatcctaagaaagtagttgattgcagtaagatttgtgctggggattcaacccatcagttcattagtgaacggaggcagaggtgatctagatagttggatggggaggcctccctggggagggaggtcacatttgagctgagacctggaggaagaaaaggagtcggggagggggtagttgagggtggacattgcaagtaaatgcaaacagcaagtgcaaaggccctgagatgggagcaggctcacttcagtcacagcaaagctgttgaaaatgggcacctaggaggcttcaaaattaaactcaataccaaaaggcagcagatggtgtcactgagtctttccccaaacaacagctgttgcctttgcaaggtatagggctgggcctgtgccttctctgtgcttctccaggctcttgcacaagttggtccacccagccagcatgccctttcctctccaattctcaaactcctatgcatccttcaaaacccactgcagattcccctcttacatgcagccttattcaaactcattcaattgtctccatgtggggactgtgctcccattcttccctttggcccaggcttgatctcccaggactgagggtacttgtctctagttctatctcccccaggttggaggattgggctgggaccagctgataggaaacccagttgaggcatgagcctgaaaaaactcttgaaatacagacatctgtgagtcattaactctgcctgagaagaaaccagggacagcttctcaaaggaggtggcattgcaccagggtcttgaaagattttctcagaatattagagctaaaggaatatatacatttttttattttggggttggtgtgggctgctctggaggccaagcctggagatcagggacctgggaaggggccctgagaggggcagaagggaggaatgtgcctgggcgcagtggccacgcctgtaatcccagcacttcaggaggccgaggcgggcagatcgcttgaggtcaggagttcgagaccagcctggccaacatggcgaaaccccatctctattataaatacaaaaattagctcggcatggtggcgggtgctgtaatcccagctactcaggaggctgaggcaggagaatcacttgaacccaggaggcggaggttgcagtgagctgagaccgcagcattgcactccagcctgggtgacagagtgacactcagtttcaaaaacaaacaaacaaacaacaacaacaaaaaaaaacagggatgggaggtggggagcaatttgggagtctcagatggagacttggtcttagaactcagaaatccccaccttgaggaacccacgcaccctgagccagcagcctcatcagcctcgaagcatttattgagcactgcctgtacatccacaggagggtgatgacaggattggcacagtgaccgtcctgtccccttgttgggggtctctcctcttccccctctaggagctgagggagctgaggagcggcatgagggacagggagggggcggcagagcttcctggggcctcaaggacaatcctttcctgtacccattcttcagatggggaaactgaggccatggaggcgttaggacgccctgagtcacccagcagggactgaaggggttctgggtggaggttaggacatcttaggctcagtgcccggggatcacgtactcctcttcatccattggggcctggcccagtgactgcaggttacagtagacaggctgggaagccaggtcgatgtccttgtagttgatgtaaaagtcattgtcctctgaagggtgagccctggggggacagacagaccaggggtaagtgtgggagggggaggactcaggggacaggcacatgagctttgagaaagtccagagtgggccaggtgctctgactcacgcctgtaatccagcactttgggaggctgaggtgggtggatcacctgagatcatgagttcaagaccagcctggacaacatgatgaaacctcgtctctactaaaaatacaaaaattatccaggcatggtggcacaggcctgtagtcccagctactcgggagtctgaggcaggagaatcacttgaacccaggaggtagaggttgtagtgagccgagatcgtgccattgcacttcagcctgggagacagagcaagactctatctcagaaggaaaaaaaaaaagaaagcttcagagtggctcagtccaccccgaatatttacatatggggaaactggcacgggctagcgttctgactcctagccaaccccacctctctctgaggaggctgcgggagggcagtgatttagggaaggttctgtgggtgtaacgctgcggtctgaggaccctgaaccctttttccttccttaaaaatgagatagcggccaggcgcggtgactcatgcctgtaatcccagcactttgggaggccaaggcagaaggtctgcttgaggccaggagtttgagaccatcctgagcaacagggtgagaccccatctctacaaaaaattaaaaaattattcaggcgtggtgacgtgtgcctggagtcccatctcctcgggaggctgaggtgggaggaccgcttgagcccaggaggtcgagcctacagtgagccgttatcacaccactgcactgcagcctggatgacagagggagaccccgtctcaaaaaaaacagaaattgaggtagctgttcattattacattaaaatctaaatttttgtttcctcttgaaaaatcggaagctctggccacgtcagtcacatgcacacaagtggctgcacccacactctgtgctccttccgatgggaaatgttttcaccactgaagcaactgactttgtggccctcatatataaaagcaagtctctgagcctcagtttctgcatctatagaattggtcaaggagcaggtagctacttaggaatatttgttatggtcagcaagacctccagagaattttcctgcctcctgaacattctaattccaacccagctcctcttgtaaaaagggccactgggccaggtgcggtggctcacgcctataatcccagcactttgagaggccaaggtgggcagatcacctgaggtcaggagttcaagaccagcctggccaacatggcaaaaccccgtctctactaaaattagccgggtgtgatggtgggcgcctgtaatcccagctactcgggaggctgaggcaggaggcaggagaatcacttgaacccgggaggtgaaggttgcagtgagccgagatcatgccattgcactctagcctgggcgacagagcgggaaaaaaaaaaaggcaaaagggctactttgtgttaacagcatctatcagtcaattatactctagtacgaattgcccaccaacccctaagtggttgtagggggacgaacaggtctgggacgcagggtttgtgtcctgccttttttgactggctatgtgaccttggacaagtcatttccctgcctcccagagcctccatgtctgtaactgtaagatgcagggtggaaatgacacagtcaattctaaacacagtgtttctggaggccagtacataaaggaggctgatccggaagcctcggggacagggaggccaagatgaacatcagagcacaagctgcttttgcgagtccagtgtcttcaacaccctgcctcagaccatttctgcttttgagccatgttgacatctgctttgcatattttctcctttctcaccaacagccttccgatagcctccccacctcctggcacggactctgctgcccaaacacagccatggccgcggccccttcctgcttggccctccctgttcccctcaggcctcagctttcaagtcatcccttctcaaaaaccattcacagcaaattctctgttctttcccacctctgggtctctgcccctgagggtcccaccccttgaaattccctccattcccttttccaacctagaaaagcttttcttttctttttttctttctttctttctttttttttttttttgagacggagtctcgctctgtcgcccaggctggggtgcagtggtgcgatctgggctcactgcaacctccacctcctgggttcaagtgattcttcttgcctcagcctcccaagtagctgggattacaggcacccacgaccatgcccggctaatttttgtatttttagtagagacagggtttcaccatattggccaggctggtctcgaactcctgacctcgtgatcctcctgccttggcctcccaaagtgttgggattacaggcatgagccaccgtgcccggcctaatttttgtattttttagtagaaacagggttccaccatgttggtcaggctggtcttgaggtcctgaccacaggtgatctgacctcgccttggcctcgaaaagtgctgggattataggcatgagccaccgcaccccacaccaacctagaaaagttcaactcatttgtctaagcccagcaaaatcatccagaagccggtggcggtggctcacacccataatgccagcactttgggaggctaagacatgaggatcacttgaggccaagagtttgagaccagcctgagaaatatagcaagacccccgtctctatgaaaaatacaaaaattagttgggtgcggcggcatgtgcctgtggtcccaactactctggagactgaggcaggaggatcacttgaggccaggagcttgaggctgcagtgatctgtgatggtgccactgcactccagccagggcgacagaatgacactgtctcaaaaaaaaatgtcggctgggcgcggtggctcacacctgtaatcccagcacttaaggaggctgaggtgggcggatcacgaggtcaggagatcgagaccatcctggctaacacggtgaaaccccgtctctactaaaaatacaaaaaattagcctggcgtggtggcgggcgcctgtagtcccagctactcgggaggctgaggcaggagaatggcatgaacccgggaggcggagctggcagtgagccgagatcgtgtcactacactctagcctggatgacagggccagactccatctcaaaaaaaaaaaaaaaaaaatcatctagtggtgatgggactttgtagggcacctctttagtatctcatgtgtgtcatggggaaatggggggctgtccccactctatggagacagaaatggaggttcagagacagccttgggtcacatgggacctgggcctatgctgctgaccgccaccgcggagccccaactccgctcaagcagttgcctcctgtctccccatccttggccgccagaaactgggtttacaggtcataagggggggaagtttgtcccatatatgggaactcacttaattcttaccccaacacactatgatgggggctgtaattctccctcattttactttattttattgattttatttttgagatggagtctcactctgtcacccaggctggagtgcaatggcatgaacttggctcactgcaacctctgactcccaggttcaagagattctcttgcctcagcctcctcagtagctggaaccacaggcgcccgccaccacacctggctaatttttgtatttttagtacagactgggtttcaccgtgttggccaggctggtctcaaactcctgacttcaagtgatccgcctgccttggcctcccaaagtgctaggattacaggtgtgagccaccatgtccagtcctctccccattttataggtgaggagactgaggctcagagaagtaaagctactcacctaagatcccacagccttcaagcggcagagctgggatttgaacctcggccatctgggtgtggagccttattattcaccactttggcaggtgtctcagtggcttacttacccttgttcatcccactggtgctcggctgctggctggcccacaaacatgttctcatagtcgggagtggaggggcaggatggcacggccacttggggcttgggggcgctccggctgccgtaccgtggctgcaagcctaaaccgggcttgggcccatcctgagcagcccagggtttgttcagctcccggcttctggccactcggcatcgccagagtctccaggccagcacagggccagcgatggcaagtccaagaagcaggcacccgctgaccaccactgccccgatagttgcagaggccaggccaggggcgcagctgacctccaggaaggcagagaggttgtgctgggagctggttgtgtcccagcagagcagaggcttctggccagagcagttgtctcggcggatgtcgtgccaggactccagggcacagttgcagtcggcctgcaggtcaaggtcacagcgggcggccagcgccccatccacacgagacaaggggttgcgtagcacgttcaggacctcaagcttctgcaggtgggcaaagaaggtcactggaagctctcgcaggccgttcccagacaggtcaaggagaatcacgttgctggcccgcagagactggttgtgaggcaggctcaggctgaggccactgaaattcaggcacgtggcactgaactccgcgttccagtccacatccgcggaggacacggtgcacgacggttctaggctgtctgactcccgcagcagcagcggcaacagcagcgtccatgccagggtgccccccattcaagcaacctacgtagagacaccggaatcctagccctgacctcagccctgtggtcgccctcgcctccaccgccagtgtttattattatagctcagaccagctcaagccgcttctgaaatggtaaaacgcagccccagtctggtcgcctcctttggctggtgggctgcctcagtctccccttctggggaatgggtagataaccccagtgcttagcgggcttggaaggcgaggaggagatccgggccagttaaccccttcttctatgtcctgaacatttggggcgccctcgttggccaggacgggaccctatgcaaataagcggttgccttggaaacggccccgccccctgatcacgctcccggtatctcccagaacggcgggtcgctgggaagtcctgggatagggtggagtgggggctgctgaaagggtcctcccaggtctggtttgcagtccctgcacaggtgcaagttctagagcctcagtcctaccttttgggtcccactgccacgcttttgcctctgcgatgctggaaaagcgacggcgcccagaggctgcgtcctggcccacctggacacgggggccgcagcggccacggccagcaccgtccgcagcgctgctggggtcgctggcgttcctctggctctgcacccagcgactcagggggaagaggaactggtgtctgggtggagtgcagaggggaagaatgaagacagagatccgcccccttgcagggcctcaaggttctcaccagaggtggatggagggcaagagggaggggtggaccagagtcccgcttccctcttgctagaacccagtgacttcatgtcctctattagcaccccaaccgactgccacctcatcaactcgcttcttgatctcagcttggctggttcccagctcatgcagtcatttattcattcaacaagcatcacccacgctgggcccccaagaggcctcagccctgaccaggtcctcaaggagctatcttaagagaggacagagctggacatagacactcctagtcccatgcagttaaggaaggtccagagggaaagacagggtcctggaaggcttcctggaggaggaggcattacagttggggcttcaacgcatgagtaggagttcactaagattccccaaacctatcattggctctccaagctcctccaagcctctcccactgagttcttgcacagtggcacctctatgctggaggggacagtgaggagggctcccagcagcttgggaaaatgtagctggctgggatagcatggttaggagtggagaggatagaaggaattggtggtgggggaagaggtccatgtggagccaaggcaggtgcgtgggcagaggggcactggctcaagaagtccctctggagtgagcctggtgtctggggtgggcaacttggggaggaggctgaggtcccagaagcagatgggggcctgaggcagactggaggggtagtagtgacaaaaatgatactgaggaggggtgggctgggagaaggcctcacctgaacctggtgtcaggtggaccaggtacaacctatgccagcccgactcactgtgccaccttaactgcgtgtgacaccatgtccacagctgtcaaatgcacagaggcttctccgggatctgggaggctgggagtccactcccccacgttttcccctcttttcggcctctgtccttcacatcgccaaactccaagaaatggtcaaaggctttgaacggagaccttgaagaaaaagcgggaaactgcttttcaacatgtccagagatgctcattcttgccaggtgcagtggcttacacctgtaatcccaacactttgggaggctgaagtgagcagatcgcttgagcccaggagttcgagaccagcctggccatcatggtgaaaccccgtctctactttaaaaaatacaaaaattagccaggtgtggtggtatgtgcctgtagtcccagctactcaggaggctgaggcaggagaattgtttgaacccaggaggtggaggctgcagtgagccaagatcactccactgcattccagcctgggcaacagagtgagacctgtctcaaaaaaaaaaaaaagttcacacttaataagaaaactgcaaatcacaaactgtttgtcttcaccaatcaaattggcaaaaatccaacaatgcaatgacattctgtgccagccaggctgtggggtgcgtccatggtgtagcactggtggagggcaccctggcacaggccaccggaatgataaactcatgtgcctgctgacacagcaagtccacttctgggaatccctgcctgaatatttgcatgtttacagtgtgaactgactaacgaataaaaaaatgtggctcagcctggacgtggtggctcatgcctgtaatcccagcactttgggggaccaaggtgggcggatcacgaggtcaggagtaccagaccagcctggccaacatggtgaaaccccgtctccactaaaaatacaaaaattagctgggcatggtggcacgtgcctgtaatcccagctactagggaggctgaggcaggagaatcgcttgaacccaggaggcagaggttgcagtgagctgagatcatgccactgcactccagtttgggcgttagagcgagactccatctcaataataataataataataataataataataatttaaaaattagctgggcatggtggcttcagcctgtagtcccagctacttcagaggctgaggtgggaggatcccttgagcccagaaggttgtgactgcagtgagccgtgattgtgccactccactccagcctatgcagcagagcaagaccctatctctaaaaaataatttaaaataaatggctgggccggccgcggtggctcatgcctgtaatcccagcactttgggaggctgaggtgggcggatcacctgaggtccagagtttgagactagcctgaccaacgtggagaaactccatctctactaaatacacaaaattagccgggtgtggtggcgcatgcctgtaatcccagctacttgggaggctgaggcaggagaatcacttgagcctgggaggtagagtttgcagttgagccgagatcacggcactgcactccagcctgggcaacaagagcaaaactccatctcaaaataataataataaataaataaattggctaaaatgttcaattttatgttgtgtgtatgttgcaggtttgtttttttgagaaggcaaagtcaggcgtggtggctcacacctgtaatcccagcactttgggaggctgaggtgggcggatcacaaggtcaggagactgagacaatcctggccaacgctgtgaaaccctgtctctaccaaaaatacaaaaaattagctgggcgtggtggcatgtacctgtaatcccagctactcgggaggctgaggcaggaaaatcacttgaaccagggagttggaggttgcagtaagcctagatcgcgccacagcactccagcctggtgacagagcgagacttcatataaaaaaaaaaaagagagagagagagaaggcaaaaagatgctccaggctcaaagtgattcattgcagcattgtttgttacatgaaaaaaaataaaatgggccgggcacagtgagtcatgcctgtaatcccagcactttgggaggtcaagataggaggatcgcttgagcccaggagttcaagactagcctgggcaatatggtgaaaccccatgtctaccaaaaaaaaaaatttttatatatatatatagatagatatacacacacacaaaaattagctgggagtggtggcacatccttacagttccagctactcgggaacctaaggcaggaggatcgcttgagtctggaaggcagaggttgaagtgagctgaaatcgtgccactgcactccagcctggggtgacagagtgcagagtgatcctctgcctcaagaagaaggaaaaaaaaaaaaaggaaataacttaaaggattggttacattagtaacagttcagttcatccatcctagcatgccacaaagttctgaaaatgaaattataaatctctatgaacctataaggaaagactcattcatttcctctgtaagcctttatgaagttcctgttgtataccaggtactatgaaccacagacacagcagtgaataaaacagacaaaaatcccagccccccctccccccacctctcactgtagttggggaaacagacaacaggcagaatccatcgggaaaatatatcaagtgcaggtggtgggaatgctgcaaagaaaaataagggcaggaaatgagatgggaaacttttatttatttatttatttatttatttatttatttatttatttgaaacggagttttgctcttgttgcccaggctggagtgcagtgatgcgatctcggctcactgcaacctccacctcccgggttcaagcgattctcctgcctcagcctcccaagtagctgggattacaggcgcatgggaccatgcccagttaactttttgtatttttagtagagacggggtttcaccatgttggccaggctggtcccgaattcctgacctcaggtgatccaccctcctcagcctcccagagtgttgggattacaggcgtgagccactgagcctggccgcagaagcaacttttcaatgggatgatcaaggaaccccttagggagtaaggaggaagggatgtggggaacagcatccaggagtgggaacagcatgtgcaaaggccctgtggtgggagcagccctgggtagagagcagatgtctccaaatgtttgttcaggctgctataacaaatatgccgtaaactggggtagcttatgaacaacagttccggaagctgggaagtccaagatcaaggcaccagcagattcacttcctagtttgcagatgaccgtcttctcactgtgtcctcagtagacagcagagggagcaggggagctcttggggcctcttttataaggagcagagggatggaggagcccagccagcagtgagcctcatgcagctgcacgtcctccacgcccagttctgaggcctcttagaaaaaaaggaaataaagaaatgaggaagtgccagacccgaggctgcaggtggtgggggacaggcaggcctggggtctgggatagtgagttttggaggtgggtctgggggagccgggggccttggagtctgaggtctgtggggtcctgagatttggggactctgaggtctggggatccaggggtctgagagtcctggaatctaagggtcctgaggtctgggggtcctaaagtctgaggatccggaggtttgggggtcctgggatctaggggtcttgggatatgggggtttggtgggggggtataggggtctggggatccagatgtctgagagtcttggggtctgggggtccaggggtctggtggttctgaagtctggggatccagaggtctgggagtcttgggatctgggggtcctgcagtctgggggccctggagtttggtagtcctggggtctgggatgtagggaaaagaaaaagcgatcagactgttactgtgtctatgtagaaaaggaagacataaaaaacttcattttgacccataccctgaacaattgctttgccctgagatgctgttaatctgtaactttagccccaacctcgagctcacagaaatatgtgttgtatggaatcaaggtttaagggatctagggctgtgcaggatgtgctttgctaataaaatgtttgcaggcagtgtgcttggtaaaagtcatcgccattctccattctcgagtaaccaggggcacaatgcactgcagaaagccgcagggacctctgctctggaaagtcaggtactgtccaagatttctccccatgggatagtctgaaacatggcctcgtgggatgggaaagatctgatcgtccccccagcccgacacccgtgaagggtctgtgctgaggaggattagtaaaagaggaaggcctcttgcagttgagctaagaggaaggcctctgtctcctgcctgcccctgggaactgaatgtctcggtataaaacccgattgtacatttgttcaattctgagataggagaaaaaccgccctatggcgggaggcgagacgtattggcagcaatgctgctctgttactctttactcggctgagatgtttgggtggagagaagtataaatctggcctacgtgcacatccaggcacagtacctgctcttgaacttgtgacacggattcctttgctcacatgttttcttgctgacctcctccccactatcaccctgctctcttgatgcattcctcttgctgagatagtgaaaatagtaatcaataaatactgagggaactcagagactggtgccagtgcaggtccttggtatgctgagcgccggtcccctgggcccactgttctttctctatactctgtctctgtgtcttatttcttttctcagtctctcattccacctgatgagatatcccacaggtgtggaggggcaggccaccccttcatgcaggtcttaggatgtgagggttctgaggtctgtgggttctggggtatggggatccagaggtctgggagtcttggggtttgggagtcctggggcctgaggatcctggggtctggggatcctggggactgagggtcctgggctctggggatccagaggtctgggagtcttggggtttgggagtcctggggcctgagggtcctggggtctggggatccagaagtctgggggtcctggggtcctgaggtctgggggtcttggggtctgggggtgctggggtctagggatccagaggtctgggagtcttggggtctggggcccctggggtctgggccttcctgacacagccccagctggctactcccaggtttctgggaaaggggacagctcaaggctccactggcctcatccctggctgaagggagcctggaactttcagaggccacctccctggggtccctctgctgccccctgatgtacctgaagccgtcccaggcttgagtcccaggcagggccagccagtctgcacaaaaacctccaggcagccgccagagatggccccagacagagagacaccagcccgccccccagctatactcagagatgccaagagaccctcagaaacacttgggggccaccataggcatgcagagacacctagggacactcagaaacgcccagggatgcccagaaaacctcagagacccccaagatcctcagagacatttagagaccttcagagactcccaaagaccctcagagaccctcagagaccctcagagatccccagagaccctcagagaccctcagagatccccagagactttcagagacattcagagacatccaggctgggcatggtggctgacgcctgtaatcctagcactttaggaggctgaggcaggtggatcacctgaggtcaggagttcacgaccagcctggccaacatggtgaaaccccgcctctactaaaaatacaaaaattagccaggaatgatagtgcacgcctgtaattccagctactcgggaggctgaggcaggagaatcacttgaacccaagaggcagaggttgtagtgagctgagattgtgccactgcactccagcctgggtgacagagcgagactctgtctcaaaaaaaaaaaaaaaaaggctgggcggggtggctcacgcctgtaatcccagcacttagggaggctgaggtgggtggatcacaaggtcaggagattgagaccatcctggctaacacggtgaaaccccgtctctactaaaaatacaaaaaattagctgggcgtggtggtgggtgtctgtagtcccagctaccggggaggctgaggcaggagaatagcgtgaacctgggaggcagagcttgcagtgagccaagaccacgccactgcactccagcgcaggtaacagagcgagactccatctcaaaaaaaaaaaaaaaaaaaagataaatattcagagacattgagaccacccagagatcctcacagaccctagagatgccctggaaagcccagaggcccccccccccgcgaaagaaaaaaacatggagagccaggcaagaagctccctggggtggccccgcctcaattcaaccccatcaccacattcacccaacaccctcaggtcctcagagcccaccctgaggtgggtgatgccagagtccctccaggcctcagcctgggtgctgccccaagaaccctcagtctaggcagtggggcaaccatggatgcctggccctgtggagtcagatcaggctggaacagggtcaagggctgccctcccccttccccagccacctgcacagaccccaaatctcccaccccagcctcctccttcctggttttctgccacctccatcctctctgtgacagccatgaggcagagcaggggaatttaaaaaccctcccccacgccaggcgtgatggctcatgcctgtaatcccagcactttgggaggccgagttgggaggatcgcttgagcccaggagttcaagaccagcctgggcaacatagtgagactctgtctctacaaaaaaaaaaaaaaaaatctttttgagacaaggtctctgtccgacacccatgctggagtgcaatgctaaaatcattgctcactgcactgcatcctcagcctctgggactcaggtgatcctcccacctcagcctccagagtagctgggtctgcaggcacatgtcaccatgcctggctaattatctgtattattttaagagatggggttggccaagtgcagtggctcatgcctgtaatcccagcactttgggagatcgagagcaggcagatcacgaggtcaggtgatcgagaccatcctggctaacaaacacagtgaaaccctgtctctactaaaaatacaaaaaattagttaagcgtggtggcgtgcgcctgtagtcccagctactccggaggctgaggcaggagaatggtgtgcacctgggaggcggagcttgcagtgagctgagattgcgccactgcactccagcctgggtgacagagcaagactccgtctaaaaaaaaaaaaaaaagacagagagagaaagaagagagatggggtttttgccatgttgcccaggcaggtctcaaactcctgggctcaaatgatcctcctgcctcagcctcccaaagtgtcgggattacaggcgtgagacactgtaccaagccaaaaactttatttatttatttatttttatgagacaggatctggctgtgtcgcccaggctggagtgcagtggcacattctcggctcactgcaaccttcccttctcgggttcaagggattctcatgcctcagcctcccaagaagctgagattataggtgtgcgccaccatgcccagctattattattattactattattattattatcattattattattatgtagagacggggttttgcaatgttagccaggctggtctcaaactcctggcctcaaatgatcttcccaccttggcctctcaaagtgctgggattacaggtgtgagccaccacgtgctgcctaaaaaagtttttttaaattagccaggcctggtggtgtgcgcctgtagtcccagctactcgggaggctgaggtgggaggatccgttgggcccaggaggtcaaggctgcagtgagccatgattgtgccaccgcactccagcctgggccacagagtgaggccctatgtctaaaaaatataaattaaaaaaaaaaatacaaagtctgcccgcaggtccgctgctggtggaatccagtcttccccagagagatggggagggctgagccaagcaccagagaccctcaataaggcctggaagtctggaggggtctgaggggctctggagccagcggtcaggaccagaagtaggtgtaatgaccatgagtctgggccagggaggacttaaaggaacggctggaaggtggactgacatggacattgtggacctatacgcattcattcatcaaacgatgattgaggctggctcagacacttccaagctgtgtgacctaggacccgcacctcaacatctctgtgccttggctgcctcctctgtatttttatattttttattttattattattattattatttttgagatggagtctcgctctgtctcctaggctgaagtgttaggggcatgaacttggctcactgcgacctctgcctcccgggttcaagcgattctcatgactcaacttcccaagtagctggaattacagatgcacaccaccacgcctggctaatttttgtatttttagtagagacggggtttcaccttgttggccaggctggtctcgaactcctgacctcaggtgatcctcccacctcggcctcccagagtgctgggattacaggcgtaagacacagcacccagcccaaagcatgactttttaataacatgagaagaccttgtttaaggtcacatggccttgttagttatagtaatgttttttttgttgttgtttttgtttttgagacggagtctcgttctgttgcccaggctggagtgcagtggcgtgatctgggctcactgcaagctccgccccccgggttcacgccattctcctgcctcaacctcccaagtagctgggactagagtagctgggactacaggcgcccgccaccacgcccggttaattttttgtatttttagtagagacggggtttcactgtgttagccaggatggtctcgatctcctgacctcgtgatccacccacctcggcctcccaaagtgctgggattacaggtgtgagccactgtacccggccttagtaatttttgttttgttttgttttttgacgcagagtctgggctcagtcacccagcctggggtgcagtggcgcaatcatggctcactgcaacctgcacctcctcggctcaagtgatcctcctacctcagcctcccaagtagctgggattacaggtgcacaccaccacacccgcctaatttttctatttttctggtagagacagggtttcaccacattgcccagactggtctcaaacttctgggctcaagcaaccctcctgccttggcctcccagagtgctgggactacaggcatgagccaccacgcccgccctgctggttctagtaaaattttaaaagccactgaatacctttgggagagtcgtggggaaataaaacgtggcatgaaggcagccatggtcggccaagcatgtcccacctgtgaggcttgcatttcttggctgacagtgacgctgaccacgggaggccacgtcatggccacatggctctcttgagagcagtcttcaaccacagacggaaggagagttggctgtaaatgcctccgctccctccaccctcaggtaggacaacagaagcacctcttctgttgctgtctccctgagaaaggacccattcctggtggcccacgttgaacctgctcgctggcaccccctgcagggctccccttcccttcctgcctctttaacccccaggagggcttctgggatcacctctcagataatgcccctgaattgagtcttagagtctccttcaccaagccaccaattttttttttttttgagactgagtaccgctctatctcccaggctggtgtgcagtggcaccatcacggctcactgcaaactccgccccccaggttcaagtgattctcctgcctcagcctcctgagtagttgggattataggcgcccgccatcgcacccggctaatttttgtatttttagtagagacagggttttgccatgttggccaggctggtctcgaacctgatctcaggtgatccgcctgccttggcctcccaaagtgctgggattacagtcgtgagccaccgcacgcggcccaaaccaccaaattaagacagttcttttggtttgtttttttgagacaaggtctcactcggtcacccaggctggagtgcagtggcgtgatctcactcactgcaacctccacttcctgggctcaagcgatcctcctggctcagcctcccatgtagtggggaccatgggtgtgggccaccacacttggctaattttttgattttttgtagagatgagggtcttgctatgttgcataggctggtctcaaactcctggcctcaaacgatcctcccgtcttgccctcccaaagtgctgggattacaggcatgagccaacatgcccggcctaaatcagcaaattataaaggagattagacagtaatagtgctgtggtgctgatctgcctatggagtggccattctttttttttttttttttgagacagagtctcgctctgtcatccaggctggagtgcagtagtgcgatctgggctcactgcaacctctacctcccaggttcaagcgattctctcgcctcagccttctgagtagctgggattgcaggtgtgcgccacgtcaattggctaattttttgtgattttggtacagatacggcttcaccatgttgcccatctgttctcgaactcctcagctcaggcaatctgtttgcctcggcctcccaaagtgttggtattacaggcgtgagccatggcgaccagctgtagccattcttttattattttactttcttaataaatttgatttcacttaaaaaaaaaatgccatggccaaaaaattagagtcaaggagtcgggagagtaggatggttcaaagatttttcttgttttgaaacagagtcttgctctgtcacccaggctggggtgcagtggcacaatcatggctccaccacatccagctaattttttattttttgtagagacaggaggtctcactgtgttgcccaggctggcctcaaattgctggcctcacgtgatcctccctcctcggcctcccaaatgctgagattacaggcatgagccaccgtgcctggcctggttcagtttttgttttttctttcttttttgagtctgagtctcgctctgtcatccaggctggagtgcagtggctcaatctcggctcactgaaatctctgtctctcaggttcaagcgattctcctgcctcagccgcctgagtagctggaaatacaggcgcatgacaccacacctggctaatttttgttttttggagacggagtctcgctctgtcgcccaagttggagtgcagtggcacgatctcggctcactgcaagctccgcctcccgggttgaagccattctcctgcctcagcctccagagtagccgagactacaggcgcccgccaccacgcccggctaatttttttttgtatttttagtagagacggggtttcaccgtgttagccaggatggtctcgatctcctgacctcatgatccgcccgcctcgacctcccaaagtgctgggattacaggcgtgagccaccccgcccggcctaatttttgtatttttagtgaagacagggtttcaccatgttggccaggctggtattgaactcctgacctcaagtgatccgcccacctcggcctcccaaagtgctgggattacaggcgtgagtcaccgcgcccggcctggttcagttttaaacgggctagtcaaagaaggcctctctagaaaaaaatatggacaaacaagaaaaaaagatgcgcagggaggagttcaaaatggggacaggatttttgggggtgtggcgtgactgggtgatgttttctatatttgcctcctccttgccatgaaataattcaatacagaaatatgtaaatatacatttgtaagccgacctgagagcaagggcaaggtcaagagaggcagactagattccaccgctgacccttggggtcttagctcagggaggcctcaaggggatgctgggggcgggacctgctgggattctcaggagttgctacattgagtctctgctgccctcaagtggttatattcggaaccgcaggtgctggctgccttggcgaaggcaggcaactccgtagaccacacagaggagttcagcacagaggggacattggtaatctttagtccatttgctcagcaacaaatatttgttgagcacctactgtatgccagaaagtgttataagcgctagggacacagccctgaacaaaacatacaaatttcggccgggcgcggtggctcacgcctgtaatcccagcactttgggaggccaaggcaggaggatcacttgaggccaggagttcaagaccagtctgggtagcatagtgagacccccttctctacaaaagaaagcaaaacatagaaacctcctgcccgcatggagctcaagggttcctggggcaataaatatgcaaaaattaacaaacaagatatccaggaagggtcaggtgcatgggctcacgcctgtaatctcaacactttgggatgccaaagtgggcagatcacctgaggtcaggagtttgagaccagcctggccaacatgatgaaaccttgtctctactaaaaaaatacaaaaagtagccgggcgtggtggcacacacctgtaatcccagctactcgggaggctgaggcaggagaattgcttgaacccaggagagggaggttgcagtgagtcaagattgcgccactgcactccagcctgggcaacagagcgagacttcgtcttaaagaaaaaaaaaagtatccaggaagatccaacaaggtaatataatccaaacagaggtttggggacctctccgagggtatgtcactggagctgaagcctgaaggatgaagagaagctggccatggtgtacagttgtagaaaaggtatcccggccaggagaaaacccaatgcaaaggccctggggtgggatgacctggatgcatttaacataatcatgtcaaaacatgctcaatatcaggtacttaccaagtgtggactctgtggtgttgttaagccaaaggacccccagaagggaagaaaagactcgtgtccctgtaccatcccgagagggatggaccttagggtaccacaggaaatctttcttccaccagtaagaagagagactgaatctgggcacagtggcacacatctgtagtcccagctacttgagaggctgaggcgagaggatcgcttgaggccaggagttcgagaccaacctgggaaacaaagtcagaccccccacacacacacacaaaataaaattagctgggcttggtggtgcacgtctgttgccccagctactcgggaagctgagctgcgaggatcgcttgagcccaggagtttgaggctgcagtgagctgtgattgtgccactgcactccagcctgggtgacagagtgagactgtctctaaaaaaaggaggatgagggccaggtgcagtggttcatgcctgtaatcccagcactttgggaggctgaggtgggtggaccatcaggtcaggaggtcaagaccagcctggccaagatggtgaaacgccgtctctactaaaaatacaaaaattagccgggcgtggtggcaggcgcctgtaatcccagctactcgggaggctgaggcagagaattgcttgaactcaggaggtggaggtttgcagtgagtcgagatcgcaccacggcactccagcctgggcaacagaatgagactccatctcaaaaaaaaaaaaaaaaaaaaaggaggaggcggaggctggagctctagacagacgaggtgaggaatgggcattgtcagggtacctcgaagtcagatctggtgcctccactccctgatttgtgtccccaggcaagttgctttgctgctctgaacctttctcagacataggtgagtgccacctatgggtctctcacacgacacccttgatgccgtgatgagcctcagtttccccatctgtaacatggggagaagaaatgacagccaggagtggtggcgcacacctgtggtcctagctacttgggaggccaaggtgggaggactgcttaagcccgggaggtggaggctgccaaggcagctggttgaggttcagcgagagcactgaagcagagcgctgggtgcacggtagctggggcttccagtagctggctctgagttgaagattcaagggcaggtgggatcaggtggggtgaggggatacctgggaggtgaccccaggaagctcctggtagggaatgggacatgagacaggaagggaaggagccctacagggggcaccaactgccaacagacatgacacatgtggatgagtggcgctcagccccgcctgggacagctgggggacagtgtagatgctcatctcagaggggtcccactcaggggcgaggagcgtggggtgttttggtttgggtttttttttttttttttttagacggagttttggtcttattgtggacgtgggggagggacgacgaacgtgagggtgggaggttgtaggttcagcagaggctcctcggccaggagtgcaatggcacaatctcagctcacggcaacctccgcttcctgggttcaagagattgtcctgcctcagcctcctgaatagctgggattacatacaggcacgcgccaccacgcctggctaattttttgtaattttagtagaaatggggtttcaccatgttggccaggatggtctcaaactcctgacctcaggtgatccactcgccttggcctcccaaagtgctgggattacaggcgtgacccaccacacccagccctgtggggtgtttatccacccccaacctcattttgatttcccagaaaacagacccaagatggcacactgagaatgtggggcacatgggtatccggccatgggagctggggaagggccctgcagggggtgcccaggagcaggggaggtcgtgggaaatgaagctcagtcctgtcggagaccttagggagactggcatgtccttagacggggcattcccagggcaggcacggtggtggctcacacctgtaatcgcagcactttgggaggccaaggcgggcagatcgcctgaagtcgggagttcaagaccagcctggccagcatggtgaaaccccgtctctactaaaaatacaaaaattagccaggtgtggtggcaggcacctgtaatcccagctactcaggaagctgaggcaggagaattgcttgaacctgggaggcggaggttgcagtgagccgagattgtgccactgcactccagcctgggcaacagtgcaagactccatctcaaaaaaacaaacaaacaaaaaaaacggcattccctcggccagagaaagctacaggtgaggagtagcagaagctggcggtggggagtgcagccacgtggttaggcccaggatgggctgcagccagcgtgcacccagagctaccagcagctattacagaccctcctcctagacctgggatttctaagagacacctcgagtctcccagaccagacagggtactggaagcactctgatgggtggggtattgcctctgggtcgctcacatgacgtccttggttcctttacgagcctcagtttccccatctgtaacatggggagaagaaatgatggctgggcttgttagtgcatgcatttggtcccagctacttgggaagctgaggtgggaggatcacttaaacccggaggttgaggctgcagtgagctatgattgtgccgctgcactccagcctgggtgacagagtgagacacccatatctaaaaagaaaaactagagatgctgccaccttctttggtctggaaggaggacattaccagaggatggaagccagttcccaagggttagtatgactctggagttcaagtgcagggcagaggggtggggcttcgatgtgtggccggtgaaagccacacaaggtgctagaagcacagaagtgtaccggctttggttaagctttgtggaggacggacgtgggggtgtgagttgcaggtttggcagaggcttcttggccaggccctcctgtatcccttctgtcacccggagtccctcgcagccctgtgggattggtggcatgacccagtggcttggaggggtcactgaagttcagctgtttcccggtcaaggccacacagtgagccagggcacagctaggttcaaacccaggcccagagcctctatctgtgagtttccgcctccaggcaactagtcttggggtataatccccatttcagaaaccctagctggctgtccaaggagtgaggctgtctgaacacccctctgcccatgctggccacccccagccttcctgagtcaaaggcccagctcctcccaccccccaccctcgacctaccctcgtgttcaccagctgctgtggctgctcccaccctggtgttgtttgggttttaatttttgtgttgcatttagaaaattacccataattacagcttctgagaggaaacggtctcctagcgcagacccggctcccagctgtggccgcctcccacgcacgcacggctggggaggggttgcagggggcgccagccccagtcctggcccctcccagggccccccactttaatgaggaggagggagggaggccgtttccgccacctatggagaagaaaaaccaccagcaggaaaacccaacccggcctcctctgcaggaatggggagtactcgtgggcccccccactgctgtgtcctcaaggagacaggacccagaggaaggcggaggcggccaactgaggacgggatgcgttatttcatccgaatactgccaagtccaactagggactgtgcggaaacagtcttgcgggggcagtgcccagggaaggcttggaggaggaggaggaagaggaggagggagaggaagaggaagaggaggagttggcctcctcccccaggaggaccaaggaggaacccttggccaaaggaggagcctcagtaggccaggccagaagccagagaaaaagcgttccaggcggcaggaaccgctagcgcaaaggcttatgggtgggactgtgcagggtggatccagggtgagggtacagtcggccccttctcctggcaacctccctgccctaaaagaagattctccttagggctcctccaggcacagcccctgacccgtatttaggggacatccatggtgggtgactcaccactgtccaccccaagaagcagagacccagccgaggacctgccctgggccccttccccggggcaacctccccgccccctctgtgccaccttgatctcactggcaacggagcttcttaggtttttttagtttttgttgttgttattttgagacggagtctcactctatgcccaggctggagcgcaatcttggctcactgcaaccttcgcctcccgggttcaagcgattctcctgcctcagcctcctgagtagctgggattacagacgcccgccactacacccagctaatttttgtgttttgagtagagagggggtttcaccatgttgtttaggctggtctcgaactcctgacctgaggtgattcgcccgcctcagcctcccaaagtgctgggattacaggcatgagccaccgcgcccggccggtttttttagtttttagtaagagtcttggtctgtcgtccaggctgaagtgcagtggcacgatcacagctaactgcagccttcacctgctgggttcaagccatcatcctgtctcggcctccgaagtgctggggctacaggcacacgctgccaccacgtgcggcctcccatggagcttcttaaaatcgtgacgtagatcccatcctctcctcgcggctccacaccctcccattgctccctaatgctcttagaaaaaaatctcaccccctcccctctgggcgtggtctagctctctgccttccctgccatcatccccctcttcttcaccctgccccggccacggctgcttcctggctctgcctccagcgccttcgccgtgtgcccacctcagggccttggcccttactgtgactacagtctgaacattccacttccaggtctttcaaatccacccctcctctccccgttattaataatttttcctccccgccctgcccgtccttcgcgtgggtggggggtccctttctgcgggttctgcccccgcaaggcgtgcgccctggttgggagtgcgcgcggctcagctccccgacgccgcgtgggacccagggcccgctgccctcgcacttttccgccagcgcccaggctgtgtttggagatccttcccggttgccatgagaaccgcgctcctcgctcccgccctccgcgcctcccccatcacagctctctgggccgccggcgcctcagcctccctccctccttccctccctccctccgcctccgccctcccccgggagaccgaccgaccccgccgtcgcccgtcctgtcaccaggggtcccctccctctcacgcacgtggcactccctgaaattaaccgactgactcgccagcttttgactgtccgcctcccccatcagattctgagctccaagaggtagcaacgtgtcccggctgggtctccggagcccagcacacagtaggcgctcaatacatgtttaatggggtgaagactcacattgacccaaggaaccgtggctcacagggggcgagggaccaaccagggcacacagggccctggggagccacggagctttaggagattaaactgggggtggcaggaggggcatctgccgggcccgggagtgccggttgtcaccaaggctctgtgtgactttgggtgagccacaccctctctgtgcctcattaggagtaggcgctggcgggggcagtggtgggagcggtcattaggatgggagtgacctggacgccgaagcccacgccccccgtggtcccccaggctccggggccgtcgccagcccgaggccctgcggaattgtgcgggcccctcctaccccgccgagccggggcccggaggcccgcgggagaggaagctgggggaaggggcggccggctggacaggaagtgggaagggctggcgtcccccctcccgcgccgaggcccctcggggaggaggcggggctggggccggtcctgcccttcccttcctctccgcgggtctggagccccggcggctcccgacttcccgccggccagaaggcttggggtgggggcggggggttctcacgtactggggggcggcctctatcggggaggcatctgcggggtcagctggcagcgagagacatccagacattcacacacaaacacacacacgaaacgtgagcacagagccacacacaggtcctagggagctggcggcccacccacgcgcggagacacacacgtgcacattcggcacacacttgtgcacgcaacctcactgagcgactcggcccgactcggacccacaactgccaccgcgcagccagggacagtcgccgagacagcgataatttattgggtgtttgcccgccccccacgcacaaggatgcacacgtgcactcacacgggagccgcgtgtttgcacacacgcgggcttgcctaggaaaaaagaggaatagccgtggcaaacacagaaacatctagacccagagtcaaccgcaccgccttcccctaccctgcccatccacacacgacccactggtacccgggcatccctgccctgcgggggtccctgactcagtatccgcccccaccctctctgaacacccctggtggggggatgaagggccctaaaaggggaaaagggcacccactgcctgcaccctgactcccgcagacaaaggtgggatgcgccccatttacagctcacagcaccgaggctgagaagcccaaacagcagtcacccagcacctagtattgtcaccgggtgttacttcggggtggtgccaggtggctcccacagcctgggtactataggagctttgtgtctgtgtgcctgggttgtgtctgtgttgtgtgacttcgggcgggacgctgagtgtccgcaggccctgtgactgtggagctgggtagggtgtggttctgaggaggccgcgatagtgcgccccagggtgactgtgagttaactccgtgggctctgtccacggctgttggaagctgtggcacggccttgcataagcgcgcgcctgcgtgaggctgggtgcctgtgtgcggtggcctgtgtttagttgttccaggacggccactgtgagctgggtgtgtggcagtgtatgtgtgtcgctgggcgggctgtatgtgcggtggttcccacccttgctgagtgtgggtagctctgcggggtgagacacccaatgtcactgcctgaggctttatggggctatccgcagtcgttccagcagcggggtacacttttgctgtgtggagcgctatgttgagtgtcgctgcgaatgtgtgtggctgggtgtacaacaatgtgggtggccggctccatttgaggtgagtgaacgtgtgtgtgcacgcgcgcgtgtgcagccgcgatcagctgtgcgtccctgggtggccgtccgggatcctgacccgcgagtgtgtagccgcgcccccaccccccgcggcgggcactgcgcgtgcgcgctccggcggcgggacccacccgcgcgcccgccatcgcccctttaagagctgcgcccgcgggcggcgtagaggcagcgggcgggggcgcgcgcggcgggaggaggggagcgcgcgtttcccggaacagcccgcgcggaggaaagggaggaaaaaaagccaccctgcggccggggccggagctggagccgccgctgccgccgccgccgcggccgtctggagctcccccgcgcggacgatgcctgccgtgcccgcctggggctcggggcggtgaggcccggggcgcggggtagctatggcgacggcaagcgcggcccgcggcgccgcctgacaggtgtgggccccggcggcggcggcgtggagcagcatgtacgccaaggggggcaagggttcggccgtgccctccgacagccaggcccgcgagaagtgagtgcggggccgggggcggggctcggcgtccgcgctcttccgtgggctccggcgcgggcgggcaccgcgcggggcacgtgggcgcgggcggcggggagcgcgagcctgagcgcgctcgaggggtcgcgagattggcgggggcgcgcgacccccgaggggcacgagattggcggggggcgcgcgagaccctgaggggtcgccggagttgagggttggcgggcgacccgaggggcgctagacgggagtggacgggcgagaccggagcggctccaggggtcgcgagattggcgggggcgcgcgaaacccgagggcgcgagatttgagggggcgcgcgagatccccgagcgggtctcgggggtcgcgaggcctcctcgagacgtgggtgcgcgaggctgcggacgcatggggatcgaggtcagcgaagttttccgggacgaacaagagtgtcggctcggggaccccagtcgcctggggtagagctggagagcggctggaggggcgcgccgccacctgtctgccctggccccagcagctgtgtggggcccctggggaagccgcacggttcacagtccaggggcgggtggggacgacggagccgctctcttgataccactgaagagtgcatactgagggccccttttgttctgggcgtggctccaggccgtgggtaccaggcgctctgaagctggtaggggcaggttccaccgtgcggatggaggaagggtcgtggtggggctgaggtctctcggggtggggagtcagccgagtgtgctctccgggtggaaagcatttgaaaggtgcttggagcagtgaccgtcccgcaggaagggcacggggcagtttgcagtgttgttaaaagtgcccagaggccgggcgcggtggctcacgcctgtaatcccagcactttgggaggccgaggcggtcggatcacgaggccaagagatcgagacaatcctggccaacatggtgaaaccccgtctctactaaaaatacaaaaattagctgggcgtgggcgcctgtagtcccaactactcgggaggctgaggcaggagaatcccttgaacccgtggcgcagaggttgcagtgagccgagatcacgccactgcactccagcctggcgacagagccagattccatctcaaaaaaaaaaaacaaaaaacaaaaaaacagtgcccaggaggaggggagtcttgtcatagctgatgggggacttccaggatccttgaagttgagccacctggagtggcccgtggtgtggaactggccacccaagcagagaggaggctgggtcagcagggaggggtcccatgaggacctgccttgagggccaggccaggagtgaggacttgaatgtctgggtgctggagaggagccctggacgttggctgagtgtcccccatcctgcctcttctgcctaggctgacttgggatgccccacccctccacaaagatgcctgtcccctctgcccagcctctgggtcattttggagaagaggctcttctggctagaaggtggtaggcaaatgactgcactgtcaggcctcccttgcctgtgtgcagttaggaagatgagctccatttccaagcacccttaagcccaaagactttttgaaactggcctctggctcctgctcaggtcggaagcaggaggtgtctgccatggtcacccctggacccctggtctgtctcctgtgtgtctccaggcagctgctggctctggaggcatccacccacccagtgggaatcgggatcgttcactgattcagcatatctgccctgggtgtccctgggtgtggcagtcgggaaggcaggctccggtcgggatggcagggtcggtggccctgaagaagcccccaccccagcagggaggcaggtatccagttagcaggagaaagcaaagtggatgatagatagcgaagggtgaggggatgtcaggtggagggcacagcaagtgcaaaggccctgatatgggaccaggaaaaggagctggggctgggcccaggtggaggaagaggcagcctgcaagagtgccagatgggccccagtgggttgtgtgtgcagaagtgcgctctggctcccaggtggagtggggcttataggggtcaggaacagaggctgggaggccctggggatgtggacacagttgtctgaaagagagctggggaggccgggcgtggtggctcacgcctataatcatcctagcactttgggaggccaaggtgggtggatcatttgaggtcaggagttcgagaccagcctggccaacatgatgaaaccctgtctctactaaaaatacaaaaattagccgggcatggtggcgggtgcctgtaatcccagctactctggaggctgaggtgaaaggatcgcttgaacctaggaggtagaggttgcagtgagctgagatcgtgccactgccctccagcctgggtgacagggcgagactccatctcaaaaagaacaaaaaagaaaaacagtgaaagagagctggtggcagcctggacccaagtaagaaggaagagatttcataggtttgagccgggggtggtagggtgagggggttagctgcattcctggcccccttcccatactgtcctcccactccccaacctgcccagcagaggtgctttggggacactggcctcgggactcaaggctctcggaagtccctcagctgccagtggggaggctgcagggcccatctttggtcagagccagcctgcatgcttccatttcacggagagggtctcgtataagtgttggtttggaggtgaggttcctctatgaaagaaagcctggaaaacgccagatggccgcatgcacccatttcaacgaaagggacaccagggccctggagaggaagccacctgatgagaactcagcttctctggcacagatgagctctcagaggcagccccaggcctcagtttcctcatgtgaaatgtggacgacccatctttcaggatctttgcaaggactgggtgggagcccgtaggcagagcacctgccggggcagccacgcggctctcaggaagtatctgcctcgggcaagccacttcctgcctctgggcctcggtttccttctctgtgaaatggggtgaagaggttacactgctccaaaccttgactctccagcactgcacttttcttcctgcaatgagcctcatgcctcctaaaaatgaggcgctgcatatccttccttctctctctggccccaatcctgagccccttctggctgcccttggagcctacaggccttcccggcttacactaggtctcggccagctggctccagaaagggaccgagcacctggtgggtgcctgccctcgggggctcgcagcagatggcagtgactgtggagtgcaggggcagcagagtgggctgagggaggctggggtctgagtgggccacttgcaagaagaggggcatgtgtatatccttcagcactcaagtgttgccaggcaggttgagaagaggtccatgaatcacagccatggttggtgttgcctggcagctcgtgggtttctcccgggcttgattttgagccggcacatggatgtcggtggcttgttcatcagcctggcaggtaagccagggatgggattcacgattggacgtggtcattttggcccctggctggaaatggctatgaggggcaggtgtggagggtagtaaggagaggccgccactttgccaagaagctgccagaggcctggcctttagggttggcagaggggagggaggacggcgagggttggagggtcaggagtgagacctggtgacggatggcaaggtgacacaaagccatgagtggcaggtgtctcctgccccagcagcatctgtgtctaggaaggcgctgagcagggagcatccattgcagccattctgggtaattatggtaactcgcgtcattacggtggtagctgtggtacatttcaggccaccaggcgctagcaccccatcctggctctgcttccctgcacagcctcatgctcgctccaggtccaggcgccccatgtcctccgagtcttgtgttccttctgcagggagagctgcctgctgctcttccgggtgcctccctgttttcctttctggccacctgcctgtgtgacacagggagccctcataggtgacaggccctgagaggttgtaccggcccagggcaggtggccggtggggggcagagggcatgggtgatttgcatccagagcccttccctataactgagctcagggccccaaccggtggcgcccccagacctggcccccggagcagtcctctgggaggggaggaccttgtaggtcccaaaactccctggccgaacagccaggcttcaaaacttttcacccaaaacaataacaacccacagttcttccctggagactgaatcctgtttaaaataaaaggaccaatgtggaagggaaatcagcaaaaccgaaaacttcctttggcctcccatcgctcccaggataaactcccaaatcctcagtatggacagaatagctgctgaccttcatcagtacttaccccatggttcgcctaatcctcccggcatcccaggagggggtccccgggccggtttgttcattcactggggtgactggggcccaggatgcccagctccattctaaggtcgttgcagtgagcagactccaagtccccgccccacgtcaagctacattccattgggggcccaagacagagactctcagatggaggagacggagcagggtgggggcttccatgtgacagtgaagccccgagaggtgacactggagtctctgggtggaagtgccccaggcagggaaacagtgcgcagaggccctggggtgacagggcagccagtgtgtgggtcggggcggggggcggcacaggagggtttgaacaaggaacatgggggtggggggagcagcacctggaggggactctgtcgtaatccaggtgggagacggtgggtggcctggcccaggtgtgcagtggaggtggggagaggggcccaagtcaggaaagagatttccttcggtgtttttttaaacgcagtgatgtttggggacagctgggtggatctcacacaggtgcacgcctgtgcgcacgccaccagaggctccttggacaggatgcatgtgtaaaggccaagctgacagtctctgagcagggagggggagaatggggaaggggtgggggctcagggtgtcgaggctgggcctctagatgtcaagtgaacagggaatcccaagtttggggaaggtcaggccatagcaccctctggacagcccctacttgaaggcatcatcaaaacaggacgggcggccacacagggagagcagaggagaagacagagctggtagccgggggcgggggctggaggcaggaggacagcaggagggggcggagagggcggggtgggctctagggggccacctcctgggttaggcacttatggggacagtcgaggaacaggagacaaggaaggcaggtagaacccttcgcagccccctccttcaggagtccccctgggccttttggacagccgtgccctgggtgtggggtacccagaatgcagcctcagcaggacctcccgctgcccccgccctcccggggccgctcaccagcgttcctgcaactctgtcttaccccactctggcctttcatgccccctgctctgacccctaagtggctggggtgggaactctcttccacacctggcaggtgggttggcactgggctccccaggctagtcggtctgcccctggaacctgctcaccctggccttgtgtgctccccttccactgatggacgcaggcctgtcagccactagccacagggaaaagctcagaagcctctagatgggccagggtgccacagaagtgagctagacaggtgggcctgcaggccgccgggccaggaaagtggaggaagagcaggtgtgggagactggaggggtggaggtcaggatctagcagggcctgggctgggggcagtctcttcaagagtgctgtgatgatgcaggggtgaccattgggcgctgtgtgtcctgccccatccctgcccctggggtggccttcacagctcatgtggtgcagtgtgagcctggcgcactccaccctggaccgcctcccctccctgatgtcacccccccacttgcctttccgtagcctcagcgccttccaagctgccacagagctcacctctcttgacaggtattgcctgtctctgtctctcccctcaagaacatggcctccaggacaggggccgggtgtgtgcactgcgcaaaaggcacttcatggatgctggaggaactaatgaagaagtgaatgaacgaaggaggggaggcaggatgagatttggggcaagggcagtgcccatgaggaccaggtgggggcaggaagtccccatgttctctaggggccggggcaggaacaggaggactggaaatctgaaagggacttgggggccctgatgggtggtgggtgctaggattggagcagcctggctgggagggagcagagcgtgagtcaaaggaaggttattttaggatggggcccgcagccagagagggcggcgcagctgagctggaggcggctgtggaagggcccccaggcctgcctgcttctcgcctctagggctcagcctcaggctggccctctggtaccctgtcttgaatctaagagtcccccaacccccagcagactctcgtggtccctagctggacagtacaagagctctgagcagggagcggctcagttccagggaggtccagaagggctggtgccacaggactgggcgaccctttggatagggggtttgtcctctgctctctggtgtggcagctggactggagcggggtggacagtccggcctccccctgtgacctgcagagggccgtgctggagccacctggctgggcgagggtgactcaggtccaagcccttggggtgcacagtggttgggagggtgagtccaggggtccctggcaggctggggactcgcgcagagccctgtgggtgtttgggtagggcagcaccactgcagacatggcactgcaggccctacctcccctggccccccacctccattccccagacattgccccaggttcagcactgccctgactggggacagtctgcagaaagggttgaggccaccatggtggatgggcatctcttccccaaggaagagatggggtccagggactgcaggggatgtggggtggaggaccccttccctccttccttcctgggccggggaggctggggatgagtttggaggtgggccctgagcacactacatggcccagggtgcccagtggtcgtccccaccctgcacacacacaggaatgacactcctctatggaggagacctccccagcgctgaggcctctctggagtctcagtgttggcaggacatggccaggacttggtcctcgagggagcgtggaacacagccgaattcggcccggaattgggggtcacggatgcctgggaggggcctgcaggacatagatggataactatgagctgtccctgctgagcagctggtggggaggccacctttccacccgccctcctgagagatggaggggctttggggtgggcccttgccttggagagtctgagctccctgggccgcctcgcccccacaggttggcgctgtacgtttatgagtacctgctgcacatcggtgcccagaagtcagcccagaccttcctgtctgaggtaagccaccacctccaggctggccctccctcctcacccacactccgggggtccttcatttccactggggatccagggggtgggcccgcgttgcccctctgatggccctgggaactgagggctctgcagggtccaggccctgggctagcatccaggcatctggtccacatgcccagccgggacctgccacacatcctggggccctctgcccaccctgttacccttccctccccactccctccctgcccagatgttctctgggcaccctgctgggtggtggggcagggtcaggtagggccaccccctcaccaccttcctttccctgcagatccgatgggagaagaacatcacgctgggggagccccctgggttcctgcactcctggtggtggtacgggctgggctgctgtgggtgggctgtggaagggggttgagggaggcacgtggagcaaccatcttcccctttggcccacagcgtcttctgggacctgtactgcgcggcgcctgacagaagagaggcctgcgagcactccggcgaggccaaggccttccaggactatgtgagtcctggccccagggactcaggggctccagggcgggaggtgtgctgggcctgtggctggggaggtggggtggggggctgcacagccagaggagggctggggatggtggcagtttggggttgacaggcagagctgcagcctccactcaggctcttggccacttttggggggtccttccaccctccacttggtccagggtcactcacagagtaagggaaagctctttccactgcacacacttctgagggtccccacagccctcccacccccattggggcactggggggtgccatttccccgcatctcatgtgagcctgcgtggagatgggggaagctcactgccttccccctcctctgccgtgtgtgcattgggggtcactgctgctcctctgagcggggagcacaggtcggggtgcctgatgggccaggcactgggacactttctgaccttgccaggtatctggagctgcccactccctctctgctgtcattttccctctgggttggaaaaggtcagaggccggcctggagtggaggctgcctggctaacactaggggatggcagcctcctgttgtcatggggcagcagatggcagcccttcccttcatcctctgcgctggaccacctggccccctctgttgggtctgagggggaggtgccggctctgccggtgggcgtctggggggcgccagtcccgcccaccccctaccccctgtgcgccagagcgcaggccccagcaaggcagaggcggcccgaggggtggggcgcccatgtctctgaagatgcctccagcactctgcatgagagctgggcaggctgaagccctcctggcgtcactgctgttcacccccatggtgtcccactactcgtgtgtggtccccttgtcctagtcccgctagatctggggccccgggggtgtctggagctgtggacttgggcgactctgcccccatccctgccgtctgggtctagcatcctctctgggcgccccccgccgggccaggagggcggagctggagagtcggcgtgaacgcgcttcccaggcgcgcagcggttaccatggcagcgccggcgcagagcgtagaccgcagggcccagggcggaggccgcccaagccctggggtgaccgaatccccgcggggactcgtcatgccgggccgtcgcctccgttgctctcgctctaactgggggcgccttgcccgccgagcctgcacggaggcggccccttcctctctcgccctccgaggcgggggaggggggcggggggggctctgttcgcccctccccggctccctgccgaccttggcgtctccaggaaacgccggagcgcccagcccatcgccatggcaacgcgggccgggccggctcctcttcagggatgattgacgtagggggtctggcccgggccaaccgccggggagggcgcgccgcccgggattaactgctcagggcctagagttgggaagctgcgggtcgcagggggcggggggggggtgcggtggagcgtccccgaccaggaaacgctcaggcacccgctgtggcccgtgaggggattgccctccctgcggggtggacagacacagggctcaaaggtgccccctccccaccctcggggagtggaccggaggggccgcctgggagggcagctgctccaggccattgtgtttgcgggagggggcggggtgggggccagagcccagaggggacctggaagtttggaactgagaaagtggcacaggagtagggcacgagggctttcgaaggatttgttttgggccttgggagtgctcgccgtcacggtgggcttagggggctcccgcctccagcccctcccccagtttaggaccctggcgggaggcttgaggctaacctcagagaaggggcaggaaggggtcaacccgcagccccacagggggagggaggatttctccaggagccctcctctaggcagggggccccttgcagcagtccctgagggcaggaaacgctgtgtgactgtaggcagagtgctcaacctctctgagcccaagtggctgtagttcatgccacaaacacctgagtgtccctgtgtgctggcttgggccgaccccagagagagcccatcaccttctttttggggtttggggcttggcctggaccatacagacaggggccaggagagaagttctcccctccctgtccccagacgtgttcctctgccctcatagactgggcctcccttcccacctcacatccccctccccaccttccccctgccagaccctgtaggccccatagcagacaggtctagaacttggtccccggccaggtctgggctgccaccacaatttctggcagatacaggaagccccctctccagcaccctgtcttgtcgccttctccatctgagagaggctgggggatggggaccccaccccagaatcctgcttttcaccctccctcctggacgaagggcagggtggggtggggcaggggtctacacttgttctaaggtggagccttcagggaggctcttgaaactgccggtatatttgtgtgtatgtttatttggggggtcctgagtagagttggggacccagctgagctgccctgccagccaggacgatgcagggccagttgagatgggtctggagtggggagcaggtctgtgagaaacgagggcgacactggatcctgcgtcctacagggtcttcagacccacagatcctcaggccgacaaccccagtgtgctcactgaccaatgccagctcgctgtcccatggggccggccacctgcagagagggggggcacaccccaggtaggaagtgtccaggtgtcctgacctggccctctgggtttcccgcacccttacagagtgctgcagccgcccccagccccgttatggggagtatggccccaggtgacacaatggccgcaggctccatggcggctggcttcttccaggtatggccccggctggagtccactggcccccaactctggctgaacatgcgtttgagggtggggggggtcccacgtgggcagaggtcatgaggccggcaggctggagttgggtgggagggtcctctgtgccgcaggtgtgcccaggtgggcctttcaggggccagcgagggagggcccgagtgcagtggagggtgggtgtctgtgcacttggcctgcacatgtgtgcgcacagggtgcttggggatgcagtagccacagtggtcctggtgaccactggtgcctgagtcctgccctcaagccttcccacaaggtccctgtcccacaggctggcccacccctctgcctccatggagcccctcccctcctcagccaaacccagtagggcctcactcccccccacccacctggttctgtcctcctagggcccccccggctcccagccgtccccccacaaccccaacgcccccatgatggggcctcacggtcaggtaaggagctgtggtgcctgcccctcacacacacacatcccctcccccagcgccgccccctcccaccctcaagccatgaggtcctggctggtgccagctggccgggctttgctggctggttctggaggagggggctccccaggtcgggggccccagcatagcaggaatggggtagctttggggaccagagggtgggggaaggtgctgatccccgcccacctcttccagcccttcatgtcaccgcgcttcccagggggcccccggcccaccctgcggatgccgagtcaggtgagaaagggatgaggggagggcgggcaggagctgggccggggagggagcaccccacactcagtgccgccgcaccccctccgcagcctcccgcaggcctccctggctcccagcccctcctccctggcgccatggagccctccccacgagcccagggtgagtagggaagctccagcccctatcccgccatcaatcagaattccagctctcagagcccagaccttgctgcctccccactgtccacactggggaatggtccaggtccaagtccccttccttctgccccaccccagggcatccgagcatgggcggcccaatgcagagggtgacgcctcctcgtggcatggccagcgtggggccccaggtaagagtggagccctggtgggtggggccttcgggctgtccccggtctacccctcacagcccctttgcctccgcagagctatggaggtggcatgcgacccccacccaactccctcgccggcccaggcctgcctgccatgaacatgtaagaccctgggggatcctaggagtgtgcagttcgcaggccaccaccagcttcatggctgggtcagctggggcaggtcctgaatcctcaggacagccttggatattgtttatttcatggccaccgttgaggggaaactgagacttgaagtagcaattagtctcctggggccagtgatgggttgggattggaacctggcagctcatggtggccacttttccagcaacatctgctgctctgtggtcggtctggggatacagtggagcagggtgtggggggtgtgtggtgagggctgtgatccacatggactagccccagagtctgtcatccgcggtctcttccaggggcccaggagttcgtggcccgtgggccagccccagtggaaactcggtgagcctatggctgggtgggcaggcttggggtggggtgggagggacactgggtgagccgcctggctgactgctcacagctgcccttgtccccagatcccctactcctcctcatcccccggcagctacaccgtaagtctgagcaaagctgggtcacccctgggcaggggttgtgggatggcagatgaggggccatttctcacggttcctgtctcttgtgtgcagggacccccaggaggaggtgggccccctggaacacccatcatgcctagccctggaggtatggcctagtaagaggtgggggtgtgctagggtgggtgtgtttgggggaaaccccgtcacacctggcacccttctggtctcccccagattccaccaactccagcgaaaacatgtacactatcatgaaccccatcgggcagggcgccggcagggctaatgtgagtgggggcttgcaggggtgcttctcgaggcggtgaccccacttggggaatgggtggcccgagtcccacgctgtccccatgcccgcagttcccgctcggccctggcccggagggccccatggccgccatgagcgcgatggagcctcaccacgtgaacggatccctgggtgagtgggcgtccctgctcccgcccacgttgccttccgggcccgtgcgctccctggctgcttccccctgccgtcagcccgcctgccgggtggaggcgtctagtggcgtcctgagccccccgggggccgctcagtgacaggggctgccccgagctggagggggatccagcgaccaaaccagaggatgcactgaccgcccctcccccccaggcccaaccctccacctggcctcagtcccggggttcctggcgggctgtgcggggcgggggcgcgtcggcgggggcagcttgcgagggtcgttggcccctggaggccgaggggcatggcgccagcacgtctgagccggtgcccgtgtctgtccgtgtctgtaggctcgggcgacatggacgggttgccgaaggtaaggaggctgcgctcttgccgggggtgggatccggggggggtggcggggagggggcggggcggggagttgcgagccgacggcggccgcccccagagttcccccggcgccgtggccggcctgagcaacgccccgggcaccccgcgggacgacggcgagatggcggccgccgggaccttcctgcacccgttcccgagcgaaagcgtaagcgactgcgtcgactccccccccgcggcggcgtcgggccggaggggctggcgggcaggccccggcggggcggccggggggccagagcaagaccgtgaccgcggcgggccaggtgggggggcggccgcggcatcctttccctctcctcaacctctccccaccccccaccacctcccgctcctatttcaccgtcccgatcccatccgcccccaccccgggacccgcgccccagggcggccttcccatgcatcgcccctcccccgttccctcctgtccccaccccatgtctgcccaggacccagccctgccctgtcccccattgtccctgggggcgggtcccagcctcttccggagctgaactcggcccctgcgcgctgccccctcctctctccgcagtactcgccagggatgaccatgagcgtgtgatggggcggcagccccgggcctctctgcgggcctaggcttctgcccagcgcccctgctcagggcgaggggctgaggtcacacctcgggcacctggactcctggccaatcaaggcttgcccagctgggaggccccacacgaaagactcttaccattttattaaaaacgcaaggacctcagagacgttcttttctgtatggacccttcctgccatttgtattttgtcccagagagaaaggctctttggggggcccctctccccaggacgtcagggggtggggcccataaataaatggaagctggttttggtttttggtagcttgtctcagattccctctttggccttctgccaccacactctccaccctgtggtcttgttccgtccccgcccccatctagccccacctttgagaactgggggcagagcgaggctccaggttctgggctctccctgggagttggggtgatgaccatgggcagaggggatgggactgaagctgggcgctcaagagtcggggaagtagagggaggcagagtcaggtcacaggccccaagaaccccaggtggaaggagggctgagtggcagcgcctttatttgtgggggccttcaaggtagggtcgtggggggcagcggggaggaagagccgagaaactgtgtgaccggggcctcaggtggtgggcattgggggctcctcttgcagatgcccattggcatcaccggtgcagccattggtggcagcgggtaccggtcctttcttgttcaacatagggtaggtggcagccacgggtccaactcgcttgaggctgggccctgggcgctccattttgtgttccaggagcatgtggttctgtggcgggagccccacgcaggccctggagaggtcacacagcttagcagagccagacacccacagggagaaagggggggtatccctgccacctacagccccccaagccctgtgcatagcttagccaggggggtatctgggccccgggcgggaacctggaggctggggtgcacctgaggatgttctcgatgcagctgcgctggcggaaaagcgcattgaccaccgggctgccgggcggcactagtggcgccttgaagaggaagctgagcagggacagcacggggtggaaggtctgcggctcggggtccatgtcagtgcagaagctcacgcgctggcacagctcggtcagcagcgctaggtccagcatgatgggtgcggccagcagcgagtcctgcggggcgggtgggtcaggagatgggggcggtggccaagccctgcctcccatagcagcccctgaagccgcgccgcacctcacacgtgttgtgcagcaccagtgtgttggttccgcccagcatcagctccgaggtatactcatccagcgcgcgcttgctgtcacccacgtacggcacatacttgatgaccacctggagtgcagcaggagtttgcccgggtccctgccacccctcgccgggcaaccccgcgcccgcgcccgcgccccacgcacgcagtggtcaggctcttcgccgggcgtatagagcactgggttgctctgcaccatgtcgtccaccacgttgctcttggacacctccttagagcggaactgcaatggcgccgataggttctccccatcgttgttgcccaggtggttgtaactcacgatggacatggtctgtgggtacaagggaagccccagcagctgcaggccctgcggccccacaagccaggtgctcgcggcccaggcccccttcctgcactcggcagctccctaggcccacgcaccttgaggccggagccaatgaggaagtccacaagcacggacttgactttggtctggcctgacttgaagtcatctccgcccacaaaaacccggtgctgccacgcgagctcaagagctccgggcaccagggtgttctgcggagacccattgaggaaggcacagccctccaggatgctggccacggcgaagagcgtggagggcgacacctccagaccgagctgtgggcaaggcgggcagtcagcacagagctgtgtctgtgactggccctgcctgacccgctccacccgggcgttcgcccacctcaatggtgcgcagcaggttctcggctgtgtcgttgaggcctggaatcacctcacagaagcgctccgtgttcgccgtccacagcactatgactttgtccagccccgcgctagaccggaagtctcggatgtccctgcggatctgctccagctgtgggttggatggtgagggtgtggggaggatggagagggtgtagggaagttggttgtacatactctcggactcacagaggcctgggctactcagttccccgggtgtcaagtgaggcctggattcgcggggtggggcaaaaagagggaaccaagtggcgaagaacaggtggcaggaagcaagggatgcgggatgggacagcacctgctgcgcacgcgagcctgggatgaggttgtccgcgcgcgcgctctggttggccgcgatgaattcggggatgtaaacagaaggccggggccgcagggcctccatgtgcggccacagttgctcctgcagcccccagtccagcaccttcgcgcgccgcatcgcctcggccaggttcagcgacgagatgtcccagcctggggggaccctcacactcggccctgcccggatcctgggcccctccagaccccatctcccatcccgccccaccccggcccagggctccgcccaccatcgaacacgaggtcgttgggcgccaccatgggcagcaccgcgctgaagggtacgaacacctcctggccctcggcgtccaggcccaggctcacggtgcccgcctgagtcagcgagccgtagtagttggcctcctgggggtcagcagacacggcgaggtgacgggtgggagtggtgaaagggccgcgacccggcctgggccccacctagactctcaagccccgccccactttcgggcatttttcagttccaggctcacagccaggacggaagccgctgcccccaggcccctcccctgagacctccggcaccttaagctccgcccctgtaagactcccgaggagtccccgctacctcgcgaaacccttccacggggtccgcctgcagccaggccccgccccctgcaagccctcccgccccacagagcttcgccccctgcaggtccctcgcccactacaggcctccagacccgggcaggtccctcgcccctgcagcccctcgccccgcggaaccccaccccctacagcccccctggtcccgcagagccccgccccctgcaggctcccgcccccgcccgcaaggactcccaccaagcctccctacccaccacgcccctcccgcccccaccttgcggccgctgcgcgtgggccaggacaaacgcagtcgattggccagcaccgcggcggtgagtgtggagccgttgttcccgccccagccgacaagcatgaccccgagccggggcacctgccgggcggtccggaaggtgaagcgcgtggacgtggggtgcacctgaagacaggccgcgcagtgaatcccgggtcccgtgcccttctccccgagccgccccgctctccccagcacgcctccttcctcagccccctggtccaccttgagaacgccaccctcgcggctgacgcgcgtcgtccggtactcgtattgcgcctcgatggcctcggggccgtagaccacgtccgggctctcgacgaagaactgggcggcggcctccatcgcggcgggctgggggcccggggtgagcagggggtcagcggggactctaagcggccggggccaagccagcctgggtccccacggaggccgtccctgccccgaaccgcactcaccggcgcagagtcgactcaggcagcggcggcggacagcgcgggctctcgggcgcgcgacctccggagaaaagcgctgcggcccctcccccgccccgcccccttccccgcctctcccgcgctgggagggaggggcccaacgtctggagacccggttcgaggcccgacaacccagagccaccgtggccatcgggtccccgcctggcggaagtggccaggcgtccacgagcgcggcgcgtataggttcacctcgctcgctccgcagcccccaggggctcatggctgcctatcccccctttacaagaggacaatgaggctacacatgagcccagccacaagccagggggtggagctgggcagggaagctgggcctccgggggggtaggtagggggtctgggtcagagacactgcaggggaaacaggcagaggaccagaactccaaagccagaatctcctcggagccacactgccacctactcccccttcgtgggcagcagcacctaccaggcagtcccatcccctggctccccatgtccgcccccatccatctcgggggacaaagtcactctgtccccacggggctcacaaggatggggcctgtttggcctgtttccccacctgcagcaggagggcttggcaggagtgggccggagcgggaggctgttcgctggaaaggggaggggacgcacaggcgggcagggccgaggcaggggaggaatgaggcctgcactgcagggcgcccccctcatgcgcgctgataagggagcgtgggaacccagcgggcaggccggggcagctcccccaggaactttccaaaacaagcgcctggaggccggaaagtttccaccactggagctggcccaaaaggtggatagttgggaacgtttgcaagagacagggcctgaccttggaggatgagggcttaagactctgggtccaggcctcaccctgaaggggccccagtctgagggagttggaagtggactgggacacccccgccccagtgggtgggaactcacaggcagggcccctgcaagacaggctccccagatgagggggctgctggcaagggttttgagacatgaagaggagttcactgaaagaaaactacaggccaagccacctgagccacccagacagggcagatgaaaaattggctacgtgggaggcagtttggggtcttgggcagaccctgagggctggggatagggagtgtgaaagagtatttggtgtttgttcctggttcttggttagacattgagctcaatcaccagtggccaacgatttaatcaatcacatatatgcaaatgagacagttggggctcagaacacagaaactcccctcagcctcaagttatggggccttggcctgccccgcgctttgagcagggcatcggaaagctcagaatcgagtctctccgaccttctcctgccctcctgcctctagcccctttctcccctggaaaccatagaaaccagaattcctcttccccaaggcaggtcagagacactggagcccttctccccttaaaacaaaaaaaaagccacaaagccggcaaaggtcactctctgcctgctcccttgaagaccctcattccgggagggtcctgcccataccctggaggaaggaatgctacccagagtctaggaagtctgggcaggctggcccccctcccccacccagtctgctccctttaagatctacagtgtttcaacacattgatacacattcttcatagaacctaagccgaaaaataggcagtcagccaggcacggtggctcatgcctgtaatcctagcactttgggaggtcaaagcgggcgcatcgcttgagcccaggagtttgagaccagcctgggcaacacggggaaaccccgtctcaatacaaacaaacaaacaaaaaatagccgggcttggtggcgcacacctgtagtccagctgcgtgggaggctgaggtgggaggatcacctaagctcaggaggtgtaggctgcagtgagccatgattgtaccactgcactccagcctgggcaacagagtaataccctgtctcaaaaaaaaaatggggtttaggggaaaatatggaggggctgggagggtggcatgcctggaaaaggcatggaagcttcacggcccgcccataccttgccctgtgcgcctcctccatttggctgtgagcattttccggagttctgtgagctgttccagcaattatcaaacctgaagtggggtcatgggaactcgcaatttattagcctgcttgccagaagtataggtggcatctgacacaggtgcagccctgtgggactgacccccataacttgtggagtccgataccatctctgggaatggaactgttggacatcctgtaggtactggaggatcagagaatcggggagtttgtgcctcgaggcgacacgtgattcaggaacctgtgtagttgagagacatgaggaaggtcccaagacccagccccggggagcctgtgttcacagggccacctgtagagggtgccggaggatgggagctggcacagggcagctggagggaatcggcatagaggctgggctgcttccactcccagcagttgacaaggccgaaggagggggtttggcccctacagtcaggcctgggtgtgctgaagtcggtggtgagatgcactgttattccccagcaaagtgtgggctccctgaaggcagggatgaggctgagtcactgctgtgttgcagagcccaggtggagcttggtacaggagggggctgcaggaacaggggtgcccgttgaaagaggacaattggggcccctggcaggtggcaggagagggtttaacagctctgagcccctctctaccagggtgcccaggtcatgagggtgggaaggctctcctgaatatccggggcactagactgatggcatccatggctcaggaaggtcaggggactgactgtggcctctgcaggctgcgggggtgatggccagagtattgctgggcagttggcttagggctggcgttggagggccgggggaggcaggaccgtgagctgcaggaggttggtgttggccctgggatgttgggacagagatgttatcctgggagaacagcgtggccaggctatgctgggagcagggtacacgctgccccactgggctgcatgacttcccctcccgcgcccctcagattcctgggtggccttagaacttgggccaaggccacggacgggcagggaggccaggccccccccacagctgcaggcccaggacctttgcccacggtcctattcttcggtgttatcgcttactaaatgcaccccttcttgtccttggctggcaggttgagtgttatgttctccatggcccctggctcgttccacctgcaccaccgccgctcccgtcaggccttttccccatccccactagtggcacaggggatgcccctgccccagtgtgggaagaacaggtaatattaccgttacctgctgctgctttcatcagagggagacagtcacagctggtttcccccacccccagccccactcctgtagcctttggtgccacagggggccaaggaatcccaatgctgggttcagcccaccctatccacaccagagggtactgctgtgctcacacacctgctatggctccctatccctccgccctgacccagcctgcccccacccccgcgctccccgtcacctacagggccctctgatttggtcctttctcaggcaacggctcaggtaggctgcaaactctgccttcttatctggtcccagccagagcccctgaacaaccctttctcatcattatggcggccccaggtcacatcacctcctgatgccagcccacccccaaccacaggacagggacagccaccacagaaaccaggctgtgacacacccacacactacacacacacccacaccccaacacacaccacacacccaacacacacacccccaacacacaccacaccctcacaccacacacacacctacacaccccaacacacaccacacaccacccaacacacaccacaccctcacaccccaacacacaccacacatccggtcaacacacaccaacacacaccacacccacaccaacacaccccaacacacaccacacccacacaccccaacacacacccaccctcaacacatccccaacacaccacacacaccccacaccacacaccccaacacacaccacaccctcataccacacacccagatacaccacatccacacaccacaccccaacacacacccacatcccaacacataccacatcccaacaaacaccacatcctcaccacacacatccccaacacacaccacacaccccacaccccaacacacaccacacacaacacacccacacatacaacacacacaccctaacacatcacacacactacacacccacacacaacatccaacacacaccgacacagatatactacacacccacacaccccaacacacaccacacacacatacacaccatacaccacacacacagatacaccaacacccacacaccacacacaccagccaggcagcctgggctgccaggttcagttcagtgaaatttattggagaatgaaaaaagtcagcattcacctgtttagtgtacaaaaaggacactagatcttttaagaaaatatcaggaaactgaagacgcagatagatgcctttcaattgtaacattttggcaaaagtggaaagttcttgtaaacaccaaccccatggctcaaaatagtttttctccacagtacaacattaaaagaaaaaaaaatagtatcaataagttagaccatatttaatcagctagaactttgtccaccaacccccaaaacacaaaacttttcttagcttcataattccttaaaaggagaacaaataaacaacaaaaacaacaacaacaacaaaaaggcaaattcaactgacagccccttggactggttcccagggcagaggggcgggcagtcccgggctgggacctcctgaaatcatcccacctcaccggtgtctgcagggctgcctgcgggcgacacagcaaggtccagctgactctggaggcctcctggagcctgctcggcccttccccggcccggcccggcccaaagagaaaaacaacaacagctattgaaacatgaaggatcagtttcctcggagctctgggaacccgggggtcccaaaggagagagactctcgggcaggggtgggatacactgtgggccctccacagtcagctctttggaagctgtcaggaggcacccctccaccccccagtttagaaaaatagacatctgtatttttgcatttctgttctccctgcctgactgctgatggcagcagtgacccccatgtgatccctgggccctgagtcacagccgccatccaccccccaccacctttccaagtcatggcttcattcagccctaaatgggaacacacgcctcagaccccaccatgccctggggggtccccacatacgcacactcacacacccacacttgcgtggccccccgatgctttgggggacactagactaggcacagcaacagagcagcaattggggtgtctgcagagcctgcacccccagagcaggcagacccatcctcctggctccccagctctgcccatgggtccctggggcctccctgaccccatggcgcccagccctccatcagcccctccctgagtgcaaaccttggcggtggctctgctaagacgaccccaggacccacaagtggacagagggacggagggaggccagcagcatcgagaccacaaggtctcaacagtgtggaatgagcagcagcagcaacaaatgggaaaccgaggacatcgcaaagaaaagtctgacgccgctgcggccgagtctcaacttggagcacagaaacacagtggcccccgacagctgagggcctgaaatagcagggcaggcctgggggcgctgaaagccctctgcccccttggctctgagcagctgtctgggggcaccagctggagttctcaaaatagccacctgggccaccctgtttgcttgctggagcagagaccctgcccaaggaggagaggctggggaaaggggtgcctaaacgtagagccagagaccagcagaggccacctgcccattccccacgccctcagaacgcagctgcacctttcgacgacctctgtaatactgcaggcaggacccagggcagcggctagaccctgggtgtccgaggagagggaggcacaggtttagaaaaaagattttgcttctcttttgtacaaaaatagactcaagtctcattagcagtagctaaaagtggctgtctttgtataaaactagaaaaggcaggcgcgccaccccaagggcctaggagtcttctggcgagacaggaggctgaaccccggaggctgcagccagggaggaggcagtgggcttcctggggagcccatcataagcagggactgctcaggaagcgcagggagggccgaggtgggcttgcagccacccgccagggccagacgtctgcaggggctgccctgaaagccggcggtgctggctcagatgagcatcttcctcgggtttatttttttaaataaatcctctctcaccgccttttgctcccccgaccctcccagatccccgccatcggggagggcggctagggccaagcctgcagctgccgctggtcgtactcggcgatgagcctcttgatgtgggccagcttgctgtgcaggtactcgcagcggtgcttctcctggctgtagttggtgttggtctgtgggacagcacagtcatgctcaggacagagccgccctgggtgctgctccccgctgtaagcaggccagtgtcccccccaaaccaaaaacctgggcttggtgcccagcaaggagggttgtggtccaagggcagagtgggagttggtcccccgcacctccacagcttgtgtggctgggccaggatgccacagctgaagacttagctgggggtggtggggcaactttggcctcagactcaaaggctcttcccccacaccttggaagtagcgggcagggaggctgccccgggcccaccctcctccctccagctcccatggctcacttggagcccaccccaacacaagagacactcacctttttgatttttcgatattcctgcaaaatctgccctcgagtagtctagaagaaaaacaaaattttgagaaaacagaatgtgtccccgcctacaggaaacccaaattgagtggtcccaggtgctctgagaagggggcatgggagggtggggcagcctcaaggacaaggccaagtaacaccccaggggcccacagcggctgtagctccggagtgggtggggcatgagggaaaggctgccgggtcccctggaggcaatagcaggtggggcactgctgttgtgggggcgtggcaggacaaggaagtatccatgtcgtgggggggtggggagggggtgggggggtgcagcaaagagggagggaaggggaaggagagatgccccaagaacccgtggctcgcagcccctagaaccccatcatgagtcgtcgtctttggaaggcaaaggggccttggccaggagagaccccggcatctgattaatcagggcccagccctgtagtcaggtcaccagttccgaaaggtggcaggtggggcggctacgtccaaggctaggctaagggtggagactctctgtatacacagggcagctgaatgagctgtgagctcaagccaggggaccacaggagtcctgattcccaggaccacagggacctgtcacctccccctgctatagttgtggcagcatggatgggccccagggtgctggacagagctcagctgcggagtctcctgagggtttggcacaggtaccaagagccctgtgtcctaggctgtgagaggaccccaggcgctcaaacatgtggggatccatgtaccccggctcgcccccatccaaggaggtgggtcacagctgtccccactgcaaaggaggctgacaagctgggctgccttcaaggactcccacaacaggaccccagggccgggccagaaccatggggttgctgcatggagtgcaccagggggagaagcgctgcctggggaagggccagactctggggccaccaagctcgtggtggcgatggtgcgcgcccaagtgggccctggctcccgccagagccagggcacagtaggcagcgggggggctctacctcatactcctcggagccctgggagagctgccggagctgggcgtcgagctgggtgaaccgccgcgtgatgcgctcaatgcgggcgtgcaggtcgcggtactcgctgtactcggcattgaagtcgttcttgtagctctggcgctgctccgaagaggagatggctgcgtacttcctgaaacaggagagaggggccactgagtggaggctggaaggacccagccccacccaggaagtggccatcctggctccaccggcggcctggcctctcgggtgattccctggattatgagggggcctggcccagaagaggctgctatgtttggaattcacatactcagacttgcagtggcttctacctctgataacctgcagtgctgggggagggggtctgaacccagaaaagggaggcctggcctgcagggcccagacaaacactcacagcaagtagtcaggcgtctccgacgtggacgtgggaacactggaaacgctgcaggttccgtttaaacctacgagagcaaacacatacctcctgagtctgcgcccatggcaccggtcggcaggaagcacgccaggatggggacatgcatgaaaactgtacactttgctgctggagggacatagagggatagcagaggggatgactgtgtggcaggtgcaagggctgagcccctcgcacctggcaactgtgggctgctggacctgggcgtgccctccaggtggtgagcagagctcagcgtgcacctgcgtgtccagggcaaagccctgcaggacacagagcacccaggcatcaccacagtcacattcttggcaaacagcggacaggtcagggaactgcagggccaaagcctgcacaaccggtcagagcttcccccaggccaggcccttgctgcctccactgactgcatgtcaaaggtcactaagctgaaaacaaatgacccctggcttgacctgagtctctggggcatcccagtctctggccagacaggacaaagacaagatggccagcagggcctgcatctcttgctgctgacaaagttccacgcccttggtctgtgccccacccagatcatcccgtcctttccactagacactgaattgcacgctccacaaggcagctccaggacagggccagccagaggagcccatgggccaccccaatcggccatccatgagcaaagtgtccatgatgacgctcagcccttcgccccttcaggggcctgcccaaagcagcacagctgatggctagatggcaccccaggcagctgtcctgctcctgagccatgtggtggggtgccccggccacataagacaacacccctgagggtctggaaatcagggaggggaggggcaggaagactgaagtgcgcgtcgcctaagaccacaactacaatttagtgcgttttctagaccttcttgcagtggctttctttccgatacagaaatgattttatcaatttcagatgtatcctcaatacactttttttttttttttagagacagggtcttgctctgccacccaggctggagttgcaatggtgcgatcatggctcactacaaccttgaactcctgggctcaagtgatcctcttgcctcagcctcccaagtaggtgagactacaggcatatgccaccatgcccagctaattacaaaatttttttgtagagatggggtctcactgtgttgcccaggctggtctgaaactcctgacctcaagcaatcctcctgaactggcctttcaaagcgttgggattaaaggcatgaaccaccacacctggcgaattttttttttttttttttactttttagtagagatgaggaggcttgcctatatcgcctaggctggtcttgaactcctggacttaagtgatcctcttgacttggcctctcaacatgctgggattataggcggaaccactgtgcctggccctagtgcacattttcaggggccctctgcactatcccctgagagagcaggagtctgcgatctccagtttgctgagccctctctctcagtgtaacacacctgggctgaccacagcagcttctctgctgccaaattcccaaaagtggacgaagctcactccccacaaagtttctaacactccccactttgggccagacactgtcttccatatcaccaccacccccacctgggttgtctttaagaggctgtggccttcccagggacgcaactcaatgggcatgtattgaatgggtctgaccctggtccgggccagaaggaagtgagaggcaaggcgcagctgcgaaggccaagcccatgctcccgccacgcagtggactccgtgggtattctacaacagataactgccatgtgtcaggctggtcaacattacctcatttgacatgccccaagatcttcaccagctaggatgacaaacggggaaatcaaggctcagggtcagctcaacctggtaccagtgggaccttcaaagtccagcccttggcaaacctcagcggcccccgactcctactcaagctctggctgtgtggggccggccaagctggtccctgcttcggggccccggagaacacccccacagcagctcctctccccatctctccccttcacagcccacgtctctctacttgcttgtcctgggcacgggcacaggacagctaagacatgccctgcacaagtaccaccttcaggactctggtaacatggaccaccagcaccaggctcagcttctggtgcctccactgtccttttcttggtgcttgggacatctacccctgctttgcattttctcacctgtggtagagatgacagcccctgggccggggatgaactgcctaggggccaacacgcaccaggccagacaggaaaccaccttgagtccccaggcctgtcttggcacctaggcactgggcatccaaggaagggacacagcccagagtggtctgtggaccctggagccgggccaagggtctcaaatggcagatcctgccatttgatcgtggcccaggtctggctgtggggtgtgggtgtgtcctgggaatcaggagtcctgccctgagcatggccctggtcagagaggctgcccagggagtaaggccaccttctccccgtcggcccccacatgcagtcccacgggaggtgggaagcccagcacgaggcagggctgacccaaccccgaaagtcttccttcctatccagtaagacccagccacagttgtgaggacctgctctccagccacagcaggggacggggcatggccctctgagcaacgcaaagctataatgaaagaagggctcccaccctcatcccaggaatcccctgactcagcctcctccccagagacacaacccaaaagcacagcaggtgacaccacctgggctgccctgggccagctggcgccgagagcgaagtggccatctgcaactggccgccatcgccacatgggaccactgcagcccctgtcgcacatggtggtggaacagccgctgcacgctggccactgcttctgctggttcctataaatgaacagctgcgcaggctcatggccacggtgctaggcgggtgctactgctgctcagtttaggtgcctgggctgtggtctcggagccgcccaggtctcctggctccccaatcccagcctgccaggccctgtccccacagcagaaacctacagtccacaacagtcgcacggtgcctacagaggtccaggtgctatccctctcccaccaggatctgcccatctgcacctgtgctgcctctccctgaatagggctggcttgcctgggcccccactgtcttccctgaaccccagcagacctcagcatggccctggctcctggggcttccctgcagtcagagctggggcctgggccccattcctctctgcatgttagccccttctgcggcctcagttccccacaaggctctgggcctccggcccccagtgctggcctggcacattgactgcaagtggcaccgggcactccagacaggcagggagaggaccaggtgcaggaacatagggtgccaggtgccaggcacacagggcaaatctgatggggcctggggcaacagggtcccctcccctggcttctacagcttgagccccctcgacaccccatgagggtgaggcgggtgtggggccagtacttagagccccggcaacgccctcctgcctgggcacctacctggggtgtctgctggggctccgggggtggcatgggtggcaggtgcacagtctggaagctgggcccggggcttgtcctcagccgccctctccttgtctttgtgcttcttggacttcttcttgggcttgctgcgcgaggggctgccgtgtggcctgctgggctgggcacagtccgtcagcaggggcaggccgaggcgcacagtgggggctggggcagccgcctctccgtgctcacagtctcggccgctgtggcccaggtcattgctgacatcggccagggggtcgtgggccctcgggggctccagccgcgggggcaggtgagtgctggagctgagggtgtccgtgctggctggtgggcccggggtgggcagcaaggcctcacggccattgggcacgcccagcttcccgttgacggcaggctgagctctctgagtgaagtgcgatatccggggtttcttgttggctagggggtcgatgaaatcaggaggctgcagccgcttctggagaggagcagagatcattttagaggggagcacagagtggctgagcagcaacaggcaatcccctggcctggctagaaaacccaacgccgcctgcaaggcccacgctggccacatgggggcgcccgagcaccaagtcaggtcccaggtgccgctcagggtggcctcagctggggcccatcagcctgctgggatcgatgcagggggagggcagggcccagtgtgtgagcgggccacccctggggactggtctaaagcgctgctgtgctcagcatgcttccccagtgataactgtgacacaggagcaggaagcccagggttgagcccacatcagggagccgccccccgtcccaggttccgcactgtgacactggggtgctgcggccacactggcaggaatctgcccccaaccccaacccgacagcttcccccttggtccctgggcggagggaggcggctcaacttggagcagctcatgctccaaagagctggtgaggaaggtgacaagggttactgatgcagcacagagtgccctgcaggtgcttgggacagtcaccccaggcatgcctcacttacctgtgggggcgaggccgagcgcccacgctcgcctggggggctggaggcagcagggtctccaaggaggctgccagtgctctgtggctggcacagcttcctgcgaaggagaggcagggctaggtcagaaggtgctgagggggcctaggggccccaggcctgtatccacatgggggcccggtggagatgcctcaaggaagggacccccctcctcccaaatccagagcagggccaaggggtcacaggagcctgggcctgaggccatcctgcccccgacttcacccaaaggaggacttccccactcactgtccccctgagcccagaggaggatcactttgtgtaggtgcctgctaccggagagaccagggacacacgctagggtgctggaccctgcttttaaagacagctgttcatcctgttcagaacgctcactgcagaaactgtccaaaatgcagaagagaacggagggccctggcctaggatgagacagccttcctggaagcccaggtcacagcaggatctggagggcggcagagtggccaccagcttgactaggtgatgcagctggggaagaagggaagaaacaccccagtgcatgccccttctcccgctccatgtgatctgggcaagtggaatcccccacccccgccagcaaccctgcagcttatgggtatcctctctgacccaactgttcaattcccgggggctgtgccatctcagggcagcctagcgcccctccaggccctgcagagagacttaagtccagggccgtggccattctgccagccagtgacacccagagcccatctccctaacaaatgggctaggctacagaccactgcaggtgtcacttccctggtggcctgagaggagagccatgtggacataaacagaactcccagttaaagacagaaaactgagaacaggcatttgcatccactggacaggcaaggcagagacaaaaggaggagtgaagacaccggaaagcatagcagaagcatgagtggtgactgctgcaggatccagagaatccagggcccagagcaagaggcaccacgacctcaggggacaacagactgctgcagggccatcccccacagctctactccagatcctcatcactgctggtggggctgcaggacagtgagcccagggctgtcaggcagcaaagaggctcgggccactcctccaggcagttgggaagttacctgggccacagctggacaacaggatggccagatgtgtggcctcaggagaagaagaaacagggcccaggactagggcacatcgggattcagaggccccaagctgtgcagtgtccccaacggctgcactgcagcttccaggcaacaaacgtcagacctcaaaacagaggaacacgaaaatacatttgaaaagagactccacagggagatgaaaacgttaaaaaataaatcaacaggccgggcgcccatggctcacgcctgtaatcccagcactttgggaggccaaggcaggcggatcacctaaggtcaggagttcgggaccagtctggccaacatggtgaaaccccgtctctcctaaacgtacaaaaaaattagccgggcatggtggtgggcacctgtaacctcaattacttgggaggctgaagcaggagaatcacttgaacccgggaggcggaggttgcagtgagcagagatcatgccattgcactccagtctgggcaacaagaccgagactccgtctcaaaaacataaaataaataaataaaaaatgccagttttcgtgtccttggaaaaacaaaagctctgaatagacgtttcttcaaagaagctatacaaatggctaaaagcacataacaagatgctcaatgccatgtgtcatcagggaaatgcaaatcaaaacaacgagacactggctactctgggcacactgcctatgggttagccctgccctgcaaggagcaataatgaacaaacaaacccaccaaacaaaaaacaaacaacgagataccacttcacacacacccagggatgactggaataaaaaaaacagaaaataggttgggcgcagtggctcacgcctctaatcccagtcacagctcactgcagcctggatctcctgtgctcaagtgatcctcccacctcagcctctagggtagctgggatcacaagagcacaacaccatgcctggctaattttttcattttttgtagagatgagggtctcactatgttgcccaggcttgtctagaacttgagcccaggcttgggctcaagcaatcctcccacctaagcctcccaaagtgctgacattataggcatgagccaccacgcccggtcctgattcaacattcctcacagctacaagtttccacagattacatgtcagccacacagcgtataattccattgatctgaaatgtccacaacaggcaaatcaatagagacagaaagcagattagtagttaccaggggctgggagcatgggagggaatggggagaatgactcctgatggggatagggtttccttttggggaaatgaaaattttctggaactagacagaggtggtggctgcacaatattatgaacgtacaaaatgttactgagctgctcactttaaatggatgacttgtgttacatgaactgtatctgaataaagctgttattctttaaaaaacatccttagaggccgggcccgatggctcacgcctgtaatcccagcactttgggaggccgaggcaggtggatcacgaggtcaggagatcgagaccatcctggctaacacggtgaaacctcatctctactaaaaatacaaaaaattagccgggcatggtggcgggcgcctgtagtcccagctactcgcgaggctgaggcaggagaatggtgtcaacccaggaggcggagctagcagtgagccgagatcgcgccactgcactccagcctgggtgacgagcaagactccgtctcaaaataaataaagaaataaataaaataaacatccttagagtaggttaaaaatgacatcctgggctgggcataatggctcatgcctgtaatcccagtactttgggaggctgagatgggcagattacctgaggttgggagttcccgaccagcctggcctgcatggtgaaaccctgtctctacttaaaaatacaaaattagccggtcgtggtggcaggcgcctgtaatcccagctactcgggaagctgaggtaggcgaatcacttgaacctgggaggcagatgttgcagtgagcagagattgcgccactgcactccagcctgggcaacagagtgagactcagtctcaaaaaaaaaaaaaaaaaaggcatcctggctgggcacggtggctcacacctgtaaacccagcactttggaaggctgaggcccttgaggtcaggagtttgagacaagcctggccaacatggtgaaaccccagatctactaaaaatacaaaaaattagccgggcatggtggtgcatgcctgtaatcccagctactcaggaggctgaggcaggagaattgcttgaaccggggaggcagaggttgcagtgagccaagattgcgccactgcactccaggttgggcgatagggtgagagtccctctccaaaaaaaaaaaaaaagaaagaaagaaagaaaaagacatcctttccattaaataagaacatgatgagttaggccaggcacagtggatcacgcctgtaatcccagcactttgggaggccgaggcgggtggatcatgaggtcaggagttccagaccagcctggccaagatggtgaaaccccatctctactaaaaatacaaaaattagccaggcgtggtggcgggcacctgtaatcccagctactcgggaagctgaggcacagaattgcttgaacccaggaggcggaggttgcagtgagccgagatcatgccactgcactccagcctgcgtgacagagcaagactctgtctcaggaaaaaaaaaaaaaaaagaacatgctcctacgaaaacgcaatggggaagactcttagaaactagaaataataggccttgcatggtggctcacatgtgtaatcccagtgctttgggtggctgaggcaggcagatcacttgaggtcaggagttcaagaccagtctggagaacatggtgaaaccccatctctttgcctaggcaacagagcaacactctgtctcaagaaaaaaaaagaaactacaaataatagtaaattaagagacaggatgagaaatgtcaaagaagtctcctaaaaggagaataaaaaagagcaagagatgaaaaccagctgggcgcggtggctcacgcctgtaatcccagcactttgggaggctgaggtgggcggatcacctgagatccggagtttgagaccagcctgaccaacatggagaaaccccatctctactaaaaatacaaaattagccgggcatggtgcgcatgcctgtaatcccagctactctggatgctgaggcaggagaatggcttgaacccaggagacggacgttgctgtgagccgagatcgcgccattgcactccagcctgggcaacaagagcaaaactccatcacaaaaaaaaaaaaaagagatgaaaaccaggaagaggaggacagactctagcagcctgccaagagcagtttgaggtggtgtgcagtaggataggcctttccactaccacacacaggacagaaggacggatagacggataaggcaagttttcagcctgcgggggccgtggtgcccaccatcccagagtaggtacctggccagcccctggctctgtggaccagcacagggttggggtgggaagcctctgaccttcaacgtggagggaaagcatcttggactctacaagtctagatgtgatcaaccgccggctcagcaggaccatcgtctgggcatgaagatgtggccagcagtcctcctggagccctgtcctcagagaggtgctccaggagctgtgctcccttggcaccagggaggagcaggaaggaggagtatatagactctggcatggggctcacaggagaggggagtggctcaggttggaggtaagggcaccaggcagtgtgtggcttgggcagaggaatcaggaactcttggggggacctgcaggacccctgacccatggacagtgatgagaggagatttggataccagggacagatcgggtttggacatcatgaacaaagagaacatgagtggagaaaccaccccccaaagccacatgtggtgccagctcagctggggaggctcctgcagtgacttgggcccccacatcccatctgtctcacggcctgcactaggctaacggcctgcactgggctagcccagctggtaacaaatactccaaggccctgctttgatatacacgaagccatggtgtcaaaaactgctataaatggggctttcttagggatggggtgctaaataggaaaaaaaaaaaaaaacagctatgcagaggggcaccgcaggtcaccttctatgtggttatggcccagggacatcaaccctgccccctgcacgctagtggaagcttgtgaaggcagtgctgatccccatgccggcccagagtgaaagcagagtgccaaggggctggcatgagcccagcaagctcactcagcagacggaacatgagccttgaatcaggggagctggaggcggctctggagcctgcatcccggggaagctccccgacgccccagaggtgcagcccagccttctccacctcactccactagctctgggcagttctccttccagtgccctaagggtctgaggaacccagggggccaagggagaggacacagggtatgaggatgggggcgggtcttctgccaagactgtgccctccgccagcctgccgccaagccagggcagtgccccgcaggcccctgacctgcacacccagggtggacaggcaggcactaccctctcaggggagcagagtggacccccaacttcattctgctttccagaggcaattactgctttaaacagctgaacttccaaaaaacaactacaaactcataaatacctccgagtccctgagaaatcacttacggactaattagcagattgacctgcttcacagcccgagctcccctagctggcagcagtggagaaggaagtcattagccgcctgcctccttaaccactgctcccctgagctgctgccacttctgaccctgggtcccaattagcctgaggggatgcatttaattaacgctgcttaatgacgcctgccctgccgggagtgtcgtttggccttatttctctctacttcaggttcttgagaggctcttttcaaaaagtcagtgaacttcccaggccctgtggggatgcccaggttgtggagggaagcatgaagggaagttggggacagctgaggagggtctcagcagactgaggccttttgtctgaagattccaaggtcggggccagtgactcacacctccgtcccactctgtgagcgtggccttcccccaccacgggacaccctggggcaccacgtgggcagtagggaggatggccagagaggcctacttggacccttccatcctgctcccaagccctgtggccttcaggaccacacaagaccaccccagcatcctctgggtaagctctggctgccttcatgcgggtggggacatgctgggggatgggaggcggcattaccggacgagcacccgcttcagcagctgctggtccccctccgagtagccaggccagtccttctgcacatccttgtacatgcagtcctgcagtgtacacgtgccgtccttagcactcatgttggccacctgcaagacagagccagccatcactttgtgggaatcctgagagagacgggggactagagaaaaaagatctgatagtgggtttgggagggtgtgcagagacagtgggagacagacagagacagaggagaggaaagaggatggcccactaccgatccgtgatgtctcccacccccagttcccccgcacacaatcctcagggtgcagaagggataatgagggtcatgaaggcaggtccagactcaactgtcttagaggtgctggggccaggctggctccaaaaaggggagggctaccacctgcagtactgagaccccatcacctgccccctggcccctctagcctgctttttttccttttttgatacaagatcttagctcactatagcctagacctcctgtgctcaagcgaccctcccacgtcagcctcccaggtaggtggggccacaggtgtgcaccactatactccagctaattttttttaagagatgggatctcgctatgttgtccaggcttgtcttgaacccctgggctcaagcgatcctctgatctcagcctcccaatgtgctgggattccagccaccacacctggctcctatttcttccaggctggagtgcagtggtgtgatcaaggttcactgtagctgcaaactcctgggctcaagcgatcctcttgcctcagtctcccaagtaggtgggctataagcatgcactatcatacccagctaattttttgtatagataggatctcagtattttgcataggctggtctcgagctcctggcctcaaggatcctcccacctcagcctcccaaagtgctggaaacaggcgtgagccaccgcgctgggctccaccccatttctgatcacaactcccagggaagagtcagccacggctggggatgctgggtgaggggtacctctggggccacgtctgagcccaccttccctacaaccagcctgccttgctgttgccggttgaccaaagctaagttcgtctcccagactgctaacaaagatggattcagaacgtctgccttagagggatctgaggaagctccaggtcactgccctgagtgggtgctgcgtgctggcctacagggcactctggtctccatcttgctgcaggcatagcagtcactgttttctgctgcatctgacatggctctgcgtcacagcgtatcccatggggagcattttttttttttttttgagatggagtctcgctcagttgcccaggctagagtgcaatggcgctatcttggctcactgcaagctccgcctcccgggttcacgccattctccagcctcagcctctggagtagctgggactacaggcacccgccaccacgcccggctaatttttttgtgtgtgtatttttagtagagatggggtttcaccatgttagccaggatggtctcgatctcctgacctcgtaatccacttgcctcggcctcccaaagtgctgggattacaggcgtgagccaccgcgcccggcccatggggagcatttttaacagttgagtaatatcccacccccaaactgctgccagtttctctgtagcataaacagacattactgtgtgcagtttttttcaggttggcaacagtttccttcgacgggattcccagaagccagattagtaggtcaaaggctgaatatttttatggctcatgacaggctttgctaaatattactcagccgtcaacacccctccccttgaaggataggcttgcgggtttccctggggctcagccagtcctagaggtggacaccttccatctctgctctagatttttccacagagggagggccaagcacctttgaggcatgcagttttgtcactgccattcctcagcatgtctgagggcctgtgaggggctggaaatgaccagtctgggtgaggcacatccccctcctcttctacaagccaacagtgtcctgctgacccccacagctgcttggggggaagcagctgcataatgaatatagaagcaagaagcagacgagctgtccaggggaagtcacagtggcacaggaagggacaatctgcctgcagatgctggccaggcctgctcccaggaggcactgaaccaaagtcacctggagaagccaggcaccagcacagacacctcctggccaggccaatgcaggtcccacatctgatgactccatcgagctcccttcagcaactcctgctggcaccatgccagccctagccttgggagcaggatgggggtggacgagggccaggctgacatcctcccaaggaatgtggaacagggtcccaccagccgcgcacccgagagggacgcctatgaggagctccgtaaacatggaagaacgtcctttatacagctgctatcccggcatgccacagcatgtgctttttgctgcaggcatcacctgtgttcctgaggtgctggatgtgaccccgaacatcccacttccatcatcctaaaaggtgcaagaggctcagccatgtctcttcctccaccacagcagcgatccgaggagacccatcctcagttcacctcaaggctgcatctgcatagcctggctaatgttctgaagccagtgcgagtcactccccttcccagggaccccaggaagccaaggtggagcctcaggaacctccatgggtgaggggggtggaaggcagtcagggccatcgcacctgctccaatgcccggggtgtttctcaagagcaggctccactcgccagcaccacattccagatggcctagcctccaaccccagggaggggcactgcaggtcacagatggaagcctgatggtctgagacgtgaagcccctcacccggaggcgcaggtggagggcggcaggcagctgattcacactgaggcctgccaggctctgccaggcacgtgtagattccttccccaggccttgagtccacaaatcgtctgcaactgaagcctgaatccactgtgccaggccccacggcccgtgtgtcagcagacagtgaaggagggcctgggctccatgctgagtccacctctcaaccctggacagtcggggccatgcccagaaacgcatccatggccccctaagcttgttctaatccaggaggccctggctctcaggcaggttctgaacctgtgagagaccccaggaagggctcttccttgccagtcccaatcccagtctccatgctctggcccatcccacccgcacaagaccatctgcggagaccactggtaaagacaagacatcggggcggcacccacctgctggaggaggccatccagcgcgtccttgtccgcctgcgtcaggccgtccttctgcagtcgcagcagcagctcagccttgcggtagggccgtagtgccaggaggtgcagcactcggtcacggaagggcctctgggacaccccgctgcccccactcacggcactggcaccactcttcctgatggcactcgccaagttgatgggggttgcccgcttccgggagggcaccgcgtctgttgcacctggggctggtttccgaaactgaaccttcttgcctgcaacaagaatccaagctttagggaacagagagggcgctgccgtgtcctaagccagtgctgctgaccaggtgcccagaggtttgagactatagacagtgctggtgggaggcaccacaccaaccacagcaaaagccagcttgctccttggggaccctgggcgaccaagagcgccacctgctgcccaaggcaggcacctgcagggcacccagcctcagaagtgggaggtgcaggcggcagaactgtgttagagccttacttacttcatcacaggcaacctaaatcctggacagcaaaatcacctgatcactctcactctggtgggcagtgtgtgtgtgtgtgtgtgtgtgtgtgtgtgtgtgtgtgtgtatgtaatcacctgatcactctggtgggcagtatgtgtgtgtgagaaatcacctgatcactctggtgggcaatgtgtgtgtgcgtgtatgaaatcacctgatcactctagtgggctgtgtgtgtgtgtgtgtgtgtgtgtgtgtttgggcggggggcggggggggaaggattgttttgttttttgagacaggatcctgctctgtcacccaggctggagtgtaatacaatcatggctcattgcagccccaaacttctgggctcaagcgatcctcccacctcagcctctggagtagctgggaccacaggtgtgcaccaccatgcctggctaatttatattatttgtagagatggggtctcactatgctgcccagactggtctcaaactcatgggcccaaaggaccctcccacctcagctttccaaagtgctggtattataaaccagagccatcctgcccaacctgaggcaggggctgtttgtaaacccttctgatgttaaactgggggtccctgaactgcaagaggcagtcactcccaagcctgcacttcagagtcctatgctggccccatgtggctgccatttttgtttttctaaagtcagtaaagatgtcggagccactttcagcagctgctctgaagaccctgaggtgcaagtggcaccccagccttaggcctggtcaagctctcctctggcaggcgtggctgtgcccagagccctggggagagcaggttcccctctatccccaacgcagagacgtgggcagggtccagcacgctgctcccctgctctgtcctgaacaatgatgccccggcatccttgggaacagggtcggccgagcaagctcaacagtgcctcaaatccttcccccaaaagctcttcgtaacaacatcactctgatcttatctctcaaaatctgatctgtcaaattaacccagaaagccttgctttcagaatacccagggccagtgctcacacctctggggtctgttcagtggggtcctgacagcagggctggactcacccatatagggccaggctgattgacagggaggaggagcaacctgaggggggcactgtgagacagaggaacacgcacattcacatctttttttttttttttttttttttttttgagacagagtctcactctgttgcgcaggctggagtgcaatggcacaatctcagctcactgcaacctccgccttccaggttcaagagattctcctgcctcagcctcccgagtagctgggactccaggcgcacgccaccacaactggctaatttttgtatttttagtagagatggggtttcaccatattggccaggctggtctcgaactcctgaccttgtgatctccctgccttggactctcaaagtgctgagattacaggtgtgagccactgcatctggccacattcacatcttaacagacagcgtcccctaccagaacataaactgtttcaaaaaccctcactgggccaggggcggtggctcacacctgtaatcccagcactttgggatgctgaggtgggcggattacgaggtcaggagatcgagaccgtcctggctaacacggtgaaaccccgtctctattaaaaatacaaaaaaaaagaaaattagccgggcgtggtggcaggcacctgtagtcccagctactcgggaggctgaggcaggagaatggcgtgaacccgggaggcggaggttgcagtgagccgagatcgcgccactgcactccagcctgggcgacagaccgcgactccatctcaaaaaaaaaaaaccctcactgtacccaaagtggtgtgctaagatacatttctgatcaagtttttggctgaaggacccacagatttattaacatgtatatggggccaggtgcgctgactcatgcctgtaatcccagcattgtgggaggcccaggcgaaaggatcatttgagcccaggagtcagacaccagcctgtgcaacatagcgaggctctgtctctacaaaaaatctaaaagttagccatgtgtggtggcacacacctgtggtcccagctactctggaggctgaggtaggatcacttgagcctaggagtttgaggctgcagtgagctatgattgtgccaccgcactccagcctgagtgacagagaaaggtcctgtctttaaaaaaagaaaaaacaaaaaacaaaacacgctgtctcttcaactgttctccccacagcagccctgtgcttggggcttacagcccagggcctcaacatcatggacaacccgggctccctggccatacaacatgtccacccggactcagtgttgaccaggaagaccaacccctgcacccacatctggggtttcactcagagggaacccctctgctcagcaaagggaaatcacgtgctttcttcggaaggaggagagagaggaattgaaatgcccccgccttttcttaaagataaaactcaaaaagccatcaaggctgtcgtctgctctgagccatctccctcctccctgaagcccggcaccctactcctgccgtaatgagttcccatgactcctggagctctgcctggactaagaggcggggtgctgcagctctgtaaacaaacagcactgtgcttcccactgtcaaggcctgttggcttctcaactgctgaaaccgtttccaagttgatgctgagtggccagagctttcctgcagtgctgggtcgctggcaacagggcctgtgaggctcatttcctgcctgttgccggctgtggtggcgttgggcaggagctggctggtcaggtgagggtgggggcagcctccagagacagacatgggccttgccctaggctgcatgcccatcttcagggagcctgttgatctccctgacaggtgaaggtccccaaggctgcagcctgaaagcagggaccaccaactcacagctcctggagttctcaggcccctttgtccacctcaggcttcacaagccagcagctgccataacccaaccccctatccctcacatagcccccaggcccatgtggccatacctctcttcccaacccagactctggtccaggcacgtcctgctcagggaccgactcctcggttgacccatcatttctgtgcagggcacagccagtgcccagcctggacaggccccaaatgtctcccgacactggcagctgcccggctgccctacagccctgccaaacccactgctcacccaggtagcggcctccagccttgatgacaatggcacttcggctccgcgtctcctcctccgcctgggccatgctctgccgcgccttctggtaggagtcgtcggtggcacacaccgtgatcttgtcctgtatgctgcccaggcagtccaggtgaacttccccatgactgcaagacaaggccaggagctggggtcagcagctgggacaatgcagggaggatccgttgagggcccaagcccccagcccaccacctggcctggaaaatggactctgtcaacaccatctcaggcaatatggtttcaatggggcacatctcaaccctgggccagaggtggcagggtgacctcaagagccggcggggtgctctggggtggggcggcgcctcacctggagacatactgctggatgcagtcgaagctgccctgggggttgtcgcggccgatgttggagaggtagaaggagaacgtccgcgcctctgcggggcagtcaggctgggggatggagatgtgctgcgtggagggggagggggtgtcactgggaggtcctcggcaggacaggtccccagcctgcatcttcctgcatgagtccccacagtgcaaccctcacaacaggaatgtgctggcccttttccctaaaacacacccctgctcttcagccagtgacgggacaggcagcccatcctcagcaacacacactgcgtagagaggggactcaggcacctatgcgggtgggcatggggccaggggccgttttcagcagcaacagcactgctgtctgaggacagtgctcagcacctgcccagatgcagggcccccaccccaatcgtgtgacccctggaaagtggtttgtctggaccatgactcactttccccaccaccaaatggacagacctggcctgcgacaccctatgaggtaaaatgcaacaagaggggcttgggcagccacgcgcaactctggcgcccctccttggcgaccccctctcagcatccccccacaaaggacatggactccacgtgagtctccatttgctgcagctgtgaatcaggtaggcttgtgtcccaggggctcacagatcagaagcactggcccccaacaagcctgtcatgggtcacaccagcctgactttggctgtgcccctgcagcccagctgggcaaagctccagccctgtctgggaggacggacagccaggggcaggcaggcggatggacggactgcgctggtcccggccaggctcagtgcagggcggcatcacatcagaggccattgcattccaggctgaccccagaccctctgtcaacagagttggcccttcctaaactaatgcctgggctttggcatgagctcctcacagttagactgacacatgaagggcgctcaaatagtccacaaggaggggacaacatggggggagccctcaggtcttgtcccctggctgcagcacccccttggcacccaagccccgtctcctcctctgtgacaccatgagcgcgggagagactgtggctgaatctcctgccccctcgcccctgctgagctgcctcatacgcccatgggaggctttgcctgcctgtgcctcacctgtgagacaggacggggctcctgccaccagacacgtggaggagcaccaatccccggccctgctgtgtggccttgactgggacttgtcccctggggtagtgtttggacacacaagggaagccatggctgcacccagcccagtgccagtccctgctcccaagacaagaacagttcctgggttcggccacttggggcaggaagagtctggtctgggcttgcaggcagtccctgtaccagccagtctgcccggcctgcagacccttctccagaggcccatcctgccccttccccaggctgaacactgccccaggaaaaaagccgtcccatctgctggggtctgcccagcatcccctctcagcctcgaacatgtccccctaaggcaggtgcccttgtccctgtcatgctgatacagaaacacaagctgaggggtcagggcccaaacagcgtgctggtggagggcaaggccaaagtccattgtgggcccaccatgccaggccacacctgaacacaaacacacatctctatcagggtcagagaaggcagaaacggcctgcactcagcatcggagaaatcacacacatatagcctctgatgattcaccctcggacagagaaaccctccccacccgcccccaccacacaaccacacacacacacacacacacacacacacacacacacacacaaacacaacccctccacacacaatctccccacacacaatcccccacaaccacacaatccccacacacacacaaacacaacccctccacacacaatctccccacacacaaccccccacaaccacacaatccccccacacacacaaacacaacccctccacacacgatctccctacacacaaccccccacaaccacacaatcccccccacacacaaacacaacccctccatacacaatctccccacacacaaccatacacacacaatacccaacacatagcgccacacatacaaccaccccgacagcaccacacacaacctcccccacacacaaacacaacccacacacacaacccacacatgcacaacccccacacacacagccacacacaaacccctccacaccaaacccctccacacacaaacccctacacacaaccacacaaacacaacccagacataaacccccacacagccacacaaacacaactcacacataaccacacacacaaccacaacccacacaaacacaacccccacacacacaaacaatccatacacacacacacacacaaacacaatccatacacacagaaacacaacctcccacacacaaacaaccacacacgccctgaagcctcagccagagccatgtgggtgaccctggccatccagatctgtcctgcttcgacgccactgaggtgttttttcacccaacacacacaggtgccaccctgccctgcctgcacctcccttcccagatgtgacttttattctcgttcatacaagaaactggaaacacgctgctgggatgagggaagctcaagtttgtgagaggctctgtggtggccaggtgcacaggtgacatggtgacccagaatgagccagccagggaagctggggaccacacgtccagggaaaccaaaaagagtggctgtgggaacctgagcctggcctgggtggctctcccgccctcctctgtcatctctttaacccccactgccccctgtggtcctggcctgaggcccaagttgccagtggctcctgccccacagtgactaagggctgggcaccctcacgtgcagccctgtcccaggaaaaccccagctccacccaggttggcaggactcattctgtcaccctggcttcaggggagatgccactcagcagagagctggcagtgagaccaggccactgcctgtggcctggggcagctgtacacccagtcagcactgacagggcccccctgcctgagcctgcccagcaaccttgcttctctgtgggtaggggcttcatagtggcccttcaccctgcttggatcttttccacacaggtgtagacatctgccccccaaactccatcctagaagcaggggccaggtgcagagcccagggccaggtgtgcagctgtggcggggagtaggggctgcatgaaggggggtgacacaggcctcaaagctgatgctcgggagagtgtcgtgctgctggcgaaaaggggaagacacacagagggcatggcggttggcgtccttcaggatgcaggggtgagaaggtggggagagtgttaggaaaggtttcccggagccagacaccgaggttctcacaggccctgcctcccctagcacacgaagcgctatggagccctctgattaacgggctgttttgctgctggttaatggttaccagcccgggaccgtggggaagccagcgggatgggagcagcccaggaatgcggccactttcttcgcactagccaagagcttgcccgggttctgggacaaggtttgaaacgcagcccctgctcagccttctgaatggggtcttggttgctccttggggactgctcatgggcccagtgacccacgtaccagtgggctgccatggggccctcagatggcccacgcacagcaggtctgggtatgtctgaggtcagtcccggctccaggttatagggtgtggggaggagttgccataaacctaagcactagtccatgctcacagacacagagcccaggccacaggggctcatcctaggcgcttccgcagggcccaaaggcccgctctgcccttcccgctgacctgaccatggccaccagggggcgttgcttccaccaccgctcaagtccctgccagagtccgttcatctcttccctttgaaatccatcccaaattggggcctgctgcactccccacctgaccccagacaggagcttgggcgatgctggctgactggatccatgaaggaacaccatccagggggcgttccgacaacgatgagcccagtgcaggctctgtggcaggctgccggcagcatggcccaggaccaagagccccaaagctaacagcccactaaagtgaagcagctggccaggcgcggtggctcccgcctataatcccagcactttgggaggctgaggtgggtggatcacctgaggtcaggagttcgagaccagcctggccaacatggcaaaaccctgtctctagaaggaggttagctgtgtagccaccccaggtctctctcagtgacttgggcccctgctacacatgttattaggctccaggtcaaggcacatggcatgctgcacgcaaggacaccactgtgtgcttcggccatggccaggctgcagtgtgtcatctgacgggctcgctgagatgggggttggggatgaggggcccccccactgctcaggttggggtagaggggcatgggtggtcaggcagcagcagaaggcacagagtgactgctgtaggacaccagagggcactgtggggctgctctggcagcaagcccaggccagcccgcccctgcccccaacctctgacccctgagagaatgtcctggggaaggtaaaaaggaggtggccaaagggtgaccacaagacccaactggggctgatggaagtgtggggttgtgtcaactggctaggctgcagcccctggagattcattattccatgacatcccgtctaggggtgccctggaggtactctgtggacatggttaccatccacaaaccagatactgaaagcaagtaaaggagatgaccctcgatggtctgggtggtcccatcgaatcagcccaaggccttaagagggaaactggctggggtttggcaggaggaggaagaaactctgcctgaggactgctccatcagctcctactggaggtctgcagccagccctgagggttacagactccccagcccacagtcgtctgagcccactgcttgcaatgcatctttttatcagcacacacagacacacgtctcctagaggctccatgtctctgcagaaccctgggctgcacctggaagcccatggatcatcatgtccatatccccacatccagctgtgcagagctctcaggctgtggacagaaattgatttaggtacaacatggtaactctaaaagaaaaaaaaaaagttgggtgcagtggctcacacctgtaattctagcactttgggaggccaaggtgggaagatcatttgagcctagaagttcaagaccagcctggacaacataatgagactccgtctttacaaaaataaaaataaaatttgcctagcatggtagtgtacaccagtagtcccaactacttgagaagctgaggtgggaggatcccttgagcccaagagttcaaagctgaagtaagctatggttgtgccactgcactccagcctcggcaacagagagactcatctcttaaaaaacaaaacaaggctgggcgtggtggctcacctgtaatcccagcactttgggaggctgcagcaggtggatcacctgaggtcaggagtttgagaccagcctggccaacatggtgaaaccctatctctactaaaagtacaaaaattagccaggcatggtggcaggcgtctgtaatctcagctacttgggaggcttaggcaggagaattacttgaatccaggaggccgaagttgcagtgagccaagattgcaccactgcactccagcctagatgcaggggaacctgcaataaaggctagaagaaaaatcaaaccattctaaggcatatcgggtaggttaggggagatgaagagtcctaaaacagggggtcaaagaaggtagatgactcaccctttctctcattccctgatttttctataagatggtcatttagaagaaaacatatttcaaaaaaatgagggtgctgagtttctatgaacctctctcccaaccaaaatccagacaaatgtccaaggtccttgtgtgccctaatgcagcagtcccctacctttttggcaccagcgactagtttcgtggaagacaatttttctttttctttttttttttgagacagagtttcgctcttgttgcccgggctgtagtacaatggtgcgatctcggctcactgcaacctccacctcccaggttcaagcaattctcctgcctcagcctcctgagtagctaagattataggcatgcaccaccacacccagctaattttgtatttttagtagagacgcgtttctctacgttggtcaggctggtctcaaactccagatctctcaggtgatctgcctgcctcagcatcccaaagtcctgggattataggtgtgaaccaccacacctggccagaagacaatttttctatggatggtggaagggggacagggagccataggggaggatggtttccggctgaaactgatccacctcagatcaggcattagattctcataaggagcacgcaacctagatccctggcatgcgcagttcacaatagggttcgcgctcctgtaagaatctaataacaggctcagctgacaggaggcagagctcaggtggtcgtgctcactcacccacagctcacctcctgctgtgtgggcagttcctaaccagtccagtgctgggggttgggggcccctgccctatcagagtggaagctaggtgcacatcgctgcatgaagggagccactgggagaggagagccgcccattgcccaagcagcctgtgacgtgcacccgacacgtcctggtgtggccccagccaaggggctatcctgggggcctagaacccagccttgcatggtggcagacagggcccaaacactgccatgagctgctgctgtacccagcgagcaaggacagacctgagactataccagtcccaagattccaaatatgaatgattaagacaaaaacttaccccttggcttccttgaaatcggatagatggcctcagtgaaacagaatcctataaaaaaaaaaaaaaaaaaaaaaaggtgaggggaacatcaataaagacattgggaaacccaaagactccctccccaggtatagaaggagcagggtgaagatggtgttctcaggagaggggaaaggaaatgcacacactctgaaaattataggcaaggtcaccggagcagggttttagaaggatcagtaggagttcctcagatggacagagggctggggacacatgacaggtaagaatggggcctccagacacaggcaacaggctggcggaaggcccaggatgcaggggcggggagtgtgccatccttggaaagccaccaccagcctgtgaatccaccgggagagaagggcaaggctcaaggtgctcacagccctgccaggaaaaagcaaagacaggtcagggttgaccctggatcatgactctcccaaggacccatacaggcaaaagcagccccctccactctcacagccccagctgatcccctgaaaccaccaaccaggctaagtcctgtctcacaaacactggcttttaacaaccaggtgggtgagcactgtctatcagagcaggtgcggtggggccaccttggagcctggggtgggagcctgaggcctgcacagctccaccacacggccttggggcagtcacatggcttctggacagctggtcactgagcttggagcagtggaatttccaaggaaaaaatatacaaaagagctcaaaataaatactgacgcttcagctattcagagaccagccttctggcagtatctgagaaagaactgcgagccagaggaggactgcacctctgcatcttcttccctcttcccaacctggggccctaagcgtagatctcagtgtcccagatgctaccccacagcatagccctggctgatcaccatgattcttggtccccaaacccacccctgcaccacctggccccactgccccactcaggtccagcccactgagatgccctcccacccaggccttgctcctgtcctcatagtaccccgtcctgggctccgtctccactgctcaggtctcactccctcccaccctggtctgcccatagctctccccagagggcaaagcactacttgagtctggagaggcctgtcggaagacccggggtaagcggagcagctccacacctgcgacagtatcagagacaacacctaccccatgggtcagcccagggtccgccctctggagccactcagcactgttccaggactccagcttgagatggcacagggccctccaactgctcacatccagtgcccatcagttgggaaagacaggagctgctaggagcagcggaagccgcctgggacatgagagatggctggcctttcagcacctgctccatgtgtgccctgagccatgggtctgcttggccagcttagaccacgcagctgtatacatatgacatgcatagtgcccagagtgggaggcaccgagtgcctcactttggtctaccaggagcccccttctttgccaagtctctccaaggattttgccaagactccccaaggattctgctgtttaggggagaacagagggatggtgcccctgcacgctaacaccacccaggccgtgatgccccagaaactgccccatgcttctcaaacacgccacccctcaacaaatacatgggcccactccacagcgagcacgattcacggcgcaagccaccactgtccatggtgcaacacgtccatggcccactcccttgtcctgttccaagaccaggaaacagctgctgcagtcacaagggccactgtgctactgcgacaaggggggctcgtctagagcagctcaggaagggctagccctgtaccccaaaacacgactcaaccaccagcctgtgctgctactgcagagaacaggggacctcggcctggctgggaccttggggaagcagcatctgaatgacctttgctacaaatttggttaaacaggccaggtggttcacgcctgtaatcccagcactttgggaggccgaggtgggcagatcacttgacgtcaggagttcgagaccagtctggccaacatggtgaaacccccatctgtactaaaaatacaaaaattagctgggcgtggcagtgggcacctgtaatcccaactacttgggaggccaaggcaggagaatcacttcaacccaggaagtggaggttgcagtgagctgagattgcaccactgcactccagcctgggcaacagagtgagatcctgtctcaacaacagcaacaaaaaagaatttggttaaacacagacatgaaaaagagacctatagggaccaattaaggtgtgaaaagacaccggatgccattactcatcaaggaaatgcaaactgtaaccatagtgacctagattgatagccataaaaatattttaaaaaataaaaaaaaacataaccacactgagatagctctgtacccatcagagcagctaatctaaaagaagctgacaagagcaagtgttggcgaggacccagaacctctgccgtcgtgggcgggagtggacaaggctcagccactgtggaagccacctggcagttttctaaaaggttaaacaaagggttaaacacacccagcaattccaccccgggtatacacccacaaaaacacacttccgtacaaaaacttacacctgaacatttatagcagaattatttagagaatccaaaaagcggcagtagcccaaatgtccgtcaactggtggagagagaatcaaacaatggaatacagaggaccatgccaagtgaaagaaggctgcacgtcatgccacaggctgtatgactccatttctataaatccccaggtaaggcaaaaccaaagagacagaaagccgaccagcaggtgtccagggctggaggtgggagtggggagtggctgcagccgggcgagggtagagggtcaaaactcacaagatgggacgttttacaggatgttcgctacaccttcccaactgcccttgagctcacaggggccgtctttgttgactcagggcacaggagcaacattctctgacacacacacggcgagttctggaacagacggaggagagtcctgtccgttaaccattttcaatgcacgagtgaaagggaactggcgtaagacacaagaaccacacggagcaaaggaagcaccaaggcagaatggcccagcccaccccactcagggagcccccacaaactcatggcaccagtcctcatgggccccaggagcacacgaccaaggccaggtgggaagggtattctggaggagggagcagcaggggactggagcaggaactcagtgcagcagctgcagagagcaggtgggccccgtctctcgcggtgcaaacctctgcagaggggtcggcccggggctaacacaagcaccctgtctactgtccatgcgaggcctctgcatgtgcagctgtgagccagggatgagggctcagaaaacagtgatgatgctgaggccagttagggtgacaagggacaggaaccagttagggtgcacaacccccccaaggaactgtgccagggcagccccagctgtgcaaggctgagggtgacaggccttgaacacactggccctcccacccaccccgtggctccatgctccctgtgggccacgccatccagtgaggcatttaaccaggttctggtagctgactgtcaggtgggtcaccttcaagactcctttcttgccaagtcgcttatcccccaagggtatggagaacaagacttcatgcctcagaggagaagggctgaggggccacagagccagcctttctctatgatgccaggagggctaacctcaagtgcctgtccccatgagaggtggccgtcatcatggccaggctcccagccactctggctcacactgtatccccaccctccagcaggagaccaggcccttgttaacaacagagcaattcactcctaacatcacgcacgcatgagggtgacagacacaggacgcacccagccattaacagacacgggcactaaggctaactcccgtctaaatcatggccagccctgtgcggaccatcgggcagggacccacctcataagaacgccatgtggtatctataagcagaaccctacagacacgtgaagcagcaggaaaacgagactcctaagccagggggaaaatgagtcggcacaaagacgtgggaagcacagagatgccgactgaacagacaggggctttgggacagctactgtgaacttggaatgctccaagcctaaaggaaaacagctgaagaggaagacgtacgggtatcgtgagagagccacgaggggcttctggagctgagacacggaggatcggaatgaaacggccactaggtggaagtcacagcaggcaccacagaagaaaagggcagcgaacttgaagacaaagccacaggagccacctagatgaatcccacagtaagaagcctacaggaaacgaacaccacctcggtgacctgcggacgacagcaggggatcccacgtgcaagtaactggagtcctgagggcaggcgggggatctgagaaaagagtggccagagattcccaaatgtaacaaatgctataaatccacagacccaagaagccttgtcaacccccagcaggaaaactaccaggtcgtggcgcatcatgagcaaatcagcacagccacaacagtcgccccaagtgccgaggtgccgacactgcacatcaggagccagccccgacactgggagggcatcttcaaagtgctgagggagaaacaccgccagaccacaattccatgcccagtgaaaagagaaagggaaataaagattcgctcaaacaaatgctgagagaatcttctgtcagcatctggcctgcactgtgaggaaggttctagaagttcttcagaaggagggagagtgaccctaaatggacctatggatttgcagaggatgacgcgggcacagtgagcatgcatgaatagaaaaggcttttttcttatgatgtttctgcaaaagatcattcaaggcataaattacggtagtgaggctggggttttgaatgtggggtgctaaatagatggtgatgagaacacaaggactgggtgggggggatgagaaaaaacacagaaagcagctggggtgcagtgccctgacaagccaatcaagggcccaggaggtgagtgtcggctgcagacaggcagagccagctaggtcccttcacggtgggaccagctgtcaccctctgtgctcaccagcctggcctggtggggacgcctgacagcatgtggcccaccacaccctcttctggctgctccctccagagccaacatgcgtggtgtcatggccgaacccttgtcaggggggccaagcgcctcgttacctcatctatgaagcaggacagagggtcaggaacagactgtagcacaggtgatttccctgctgccttagaagctttggggttggcctcaggctgcattaattaaataacggggtaactcagtagcacatgacacctgcagggtactgcccatctcacacccaagaacacccagcaggggagagccatgcctcaggccaccgcctgcccagtctctgtagaccctctgaggggtcatcacccccacaagtcctctcaggccctcgagtggcaaaaatccaactttcattacccagcatgaggtatggaactgggagctcctgagatacaaagtcacccccgctgctgtacttcaggccagggccccaggtgggagctggggagcctggtagggccgccacagctggcctgacacagtcagcaggtcagctgggtcttcaaggccggacaggcaggcactgagctgtgccgaggctggtgctccccagacccaactggacttcagaccctgactcggagaacagacctcaacacagcagggcagtgatgcctgcgccctgcggtcacttggcctgggcgcccactggggctactgaacacagactgggagactcctgtaggcagctccccctcaatgaggacactcctgtaaagacagcaatgcctttgggaaaagggtcgagggtgcagagcctgggaggcagtgagagtcctcaatgctgagacagaggaaagggtgaggaggaacctctccagggccagaatcccctgatcctctcccctccggcaaagagcacttccggggatgaagcaacaggaagtggcttacgaaatccacctccaggccgagtgaccagtttacaggaagtgtggtgggtgaatcttccccagggcacgaggcaatgtctggagccatttctggtcctcaccactgagggcggggacagtccccaccatctggctcgggggaggccagggatgctgctcagcacactgcaggcaacacagaacctcctgccccaaatgtcaagcagtgcaggggctgagaagccctgggctgaccctgccacgggaagcgaccatcagagcagaaagcagaaaaatctatgggaaaaaagacctgctcccttcaacaaatataaaatataaatggaaaagttacgggtgaagaagaacgtatctgattgttggccaggcatggtacctcacacctgtaatcccagcattttgggaggctgaggcaggtggactgcttgaggtcaggagttcaagaccagcctgaccaacatggtgaaactccatctctactaaaaatacaaaaattagccaggcatggtggcatacgcctataatcctagctactcgggagcctgaggcaggagaactgcttgaacccggtaggcggaggttgcagtgagctgagatcaagccactgcactccagcctgcacgacagagtgagactccatctcaaaaaaaaaaaaaaaaaaaaatctaggattgttttaaaaactctccagcaaagacagaaactagggagagggcacagtgaagagatgagacacacagacagatggacggggcccaatctggccaggtcccaggatacctgctaccagcctggggacaatgaggcccaaggcagcaggtgccaaggctgccccaaagacacatgatccttcccaccaccctccagaagcacccactcagcagaagtgcccactctccccaggcagcacgttctccctgctgtctactgggcaaggcctgccaccccacccctgatgcaggaaatgacagaaaggaatgcatctgttccttcttcagaagtccatcttgctgactctcccaagcaccagtgtcagcacacacgtcctgatcttacagagctgggtcaccctgccaagccacggcgtgtggtccagcagagggaaggtgaagtcccgggaagagccctggacggtggcctccccacaacaggccccccctttccagtaaagcacaaatgattgggaaacgctattcaggaatcctccttgagacttcctggcaggactggagcaggacattgaggccacggagagtttagacagtgactgagtggggctgtctccgtgaactacaaaacaaaggaagatctgcccagtgagcttggttggctcagggacgagctagggaacttggacagacacattgtggacctcactggttccagcctagggaaccaggtggccacggtcagggcagagcagagggcaggacccacggcagctcctctgccagcctgggaggacagatggtgtgttcagcaggccaggtgggcctgtaagagcaggaaagggactccaactggctacaagccaagtgtaattcagtggccggcatagcaagtattttttttctttctttctttttggagataagctctcactctgtcacccaggctggagtgcggtggtgtgaacacggctcactgcagcttcgaccttctaggctcaggtgatcctcctgcctcagctcccgagtagctgggaccacaggcacacaccaacacacctggctaatttttctattttctgtagagatagggttttgccatgttgcccaggctggacttgaactcctaggttcaagcaactcgacagactcagcctcccaaagtgccaggattacaggtgtgagccaccgcacccagcccgcagcagatatttctatctgcattcacgaaggtgcatagaaagcttatggaaaagggtttttcagaaatcttgtagacaaaaatatgcagattgcccaaaactgtggcctctacacgctccacgcaccttgcttgcttttcccaggacagcacgctgagcaggccaccttcctttctgcccaatttcctgcatccccacttggagactgaccctccccgcaccctcagcaatcctggatctgtttttttgtccctatggttttgcctttccagaaagtcttatcaatggaatcacataagatgagtttcccgtggtccttgcaacaactgagcataaacttgtggcttaaaacaatggaaactggttctctcacggactgggggccagaagtctgaaatccaagtgttagcaggctccctccttttgggggctctaggggaggacctttcctggcctcttcacctgctgcaggctcaggcactccctggcttgtggctgcatcaccctaatctctgcccactggggtcatgcagccttcaagtcctcttctgtctacattaaatctgtccctctcttacgaggacacttgtgatgacaaacagggaccacccagataatgcagggtaacctccccatctcaagatccttaacctaatctcatctgcaaagtccctttttccacagaaggttacactcacaggttcctggaatctgctgtggccatgattcagccaaccacctactcagcatgacgcctttgagatccatcctgtgtgttgccccgcagtataaatacgccaccttcccgtgcatccatttgctggatgaaggacacaggttgtttccagtctggagaattaatgaatcaagcagctataaatactcatggacaggtttttctgtggacgtgttttcatttcacttggtgaacacccaggagcccgactgctgggttacagagtaggtgtacatttaatttaatatgaaactgccaggctggctcccaaagttgctgtaccattttgtactgccgccggcagcgaatgagagttcctgttgctccccatccacgtcaacatttagtgctgtcagcttatttaaaatgtcagccattctggtaggtgtgtggtgcagtgacagctcgtggaggttcatgtttgggtttccctgctgattaagcatgttgagcatctttttacaggctaatgtgccattcttctagcttcagtggtgaagctgtacaaatctttatcccatttttaaaaattgggtcattttcttactaagttttgaggtttttttttttatatacaagagctttatcagataaattttacattttactcctagtccatggcttgtcttttcattccttttttttttttttttttttttttttttaaacagggtctcgccctgtcacctaggctgaagtgcagtggtgtgatctcagctcactgcaacctccgcctcctgggttgaagcaattctcctgcctctgcctctgcctctgcctctgcctcccaagtagctgggactacaggtgcgtactaccacacccagcttatttttttgtatttttagtcgagacgggttttcaccatgttggccaggctgatctcaaactcctgacctcaagtgatttcggcctcccaaaatgctgggattacaggcgtgagccactgcgcctggactgcctttccattctcttaacagtatctctcaaaatacagaagttcttaattttgatggagtggaatttttcaatttttttcttttatgggtgggtcttgattttgtgtcttagttcctcccatctttttggtttttgttgttgttgttgttgttgttgttgttgttgctgctgttgttttgagacagggcctcactctgttgcccaggcagtgggcagtggcactatcacagctcactgcagccacagtctcctgggctcaagaatcctcccaccttatccccaagcagctgtgccaccatgcccagctacgttgtttttttaactcttttgtagaggtgggggtctccctgtgttgcccaggctggtctcaaactcctgggctcaagcgatcctctcacctcaacttctcaaagtgctgggattataagcgtgagccatcacactcccatcttttttttaaatagctctattttaggaaaatcctccaaactgccattctttaccaactcccctctcccctcccaaactagcagctctgggtaactcctgcctacacccgtggctgccacagcccccagtgaagggtctctcagattcctttgtctgcatgcaccctgggtcatgaccacagatgctccctggatattccccggatgccaccgcccacctggcagttgcagtgcagggtttttggacactatccaggtccttcttccagaaggcgctcagcaggtgagcagaaagtggcctgtgtctcatgggaagcccctcagatgtctgtccattcctgcgtcatagctgggggtgggggagctgcttggactccctgtccgtagaaatcacagccaaatcacacgcaaggactcgtggtaccacagacggccagcctccatcactaacccactctcatcctaaactgcatgggatcgggttccggttgttacaactgaggaaaatgaggtactgagagaggacagggctgcccgaggtcacagcagacctcatcccaacctcacaggaaaactgagccctggggtccccatgaagatttcacaacttatccaacctcacatgatcccagggtagcaggatatgacaaacatttactacacaattcttcaagttacagtgcttctatgtccctgagccctgcttcatcagacagacagaagtctccctccaagggagggacaagcaccctgcctgccctgcccaccctgcctgcacctccatgggtcaatctccaggcatggcccaggcctgcttccaggacagtgcatctcagagccatgcaacccatgcctggcacaagccctcctgccaacaccttaactttgcctttcccccttattattccaccttttgcatctgcctttcttcaaacagggaaagacgctgtcgtatgtgggcacctgctgcacaagtacactccatgggcacctgggccacagtgtcaggcccctctgtcccctctagcgcactctgcagtgtctgaaacagagcaaatctgcaagtgccagtgtgatgggcacagaatcccgtttggcagccagacgctgtggtggctcacgcctgtaatcccagcactttgggaagccgaggtgggtggatcacttgaagtcaagagttcgagaccagcctggccaacgtggtgaaacccccatctctactaaaaacacaaactttggccaggcgtggtggcaggtgcctgaaattccagctacccgggaggctgaggcaagaaaatcgcttgaacctgggagggggaggttgcagtgagccaagatcataccactgcactccagcctgggcaacagagtgagactcagtctcaagaaagaaaaataaaaaatttaaaaattagccaggtgtggtaatgcgcacctgcagtcccagctactcaggtgctgaggcagaaggatcacctaagcacaggcgatcgaggctgcagtgagccatggttccaccactgcactccggcaggggtgacagagagagatactgtctttagaacaaaacaaaacaaaacataacaaaaccggcaaggaagcacatgaggcttcacaaccaatgctcttttgcctccacctgtgctcctcaagaggagtgcaagagtttggtggggttttgtttttctttttaatcattcactaaaactcaccaacaacaggtactggacctaggaattttgaacggaaggccttcgagaaactgccctctcaccaaacctgccttctgcccatggtctgcggtgccagataacaactgctttcccccagacaacagtgaccatgatctgatcacatctgacaatggaagaagctaagggactgacctaggtcactggggtcctccagggcacagcatgggcctctcctagccctgggttcctgacgtttctgaggtgaatgagaacgctctagggcctgacatgggccatcccctcatcagagcccaggccaggcctctgtgggggttgggtccctgagaatgcagctctgccttgccactgtgcttcctgctcaggcagctaggaggtcccaaaccccattcacctccatgggactatttggagcccagcagaagcggcccatgggctctcctctccccaggaggcccctccaggcctccatctcaactcccctgcagacaaggccatgtgtgtgccttcgacctgtcagtctgtagggccacctcacttttgggccttccaagctcaactgctattagagcgcctcctctctgccacactcccaaggccacccgtcctcagcctcaccacagagcagactggccccttctgccgagccccagtgcacccaagctttccagctgcctccacctctcccctgaaaacagctaacactccactatgggagcccatctcctcccagggccagggagaccagggagaccagggagaccaggtctggcccccaactctaaggctcatcttagaggcgagattcaggcccagcccagggtgccccatgaggcctggtggttggaggcagagggtatcccttgcccaaattcgtgccacattcacagtcactgggaaagctacggggatgggccgggcgcggtggctcacacctgtaatcccagcactttgagagccaagacgagcggatcacgaggtcaggagattgagaccatcctggttaacacggtgaaaccccatctctactaaaaatacaaaaaattagccgggcgtggtagcacacgcctatagtcccagctatttgggaggctgaggcaggagaattgcttgaacccaggaggcagaggtggcagtgagccaagatcacaccactgcactccagcctgggcgacagagcgagactctgtctcaaaaaaaaaaaaaagaaagcaagctacggggatgaaaacagttaaggcactctcctggatgcatcacgaagcccctcagccactgtttctccctgagagcacagccaccccctgctgaccttggcaggaagcaacaagccccacagcacaaacacccccaggctgccctgcagagggggctccacctcgggtgggagccctgcaacctgggaaggaatctggggaggggcttctgtgtgaagcttagctcagggccccaagggcggtcagtgtcaggcactggctcaacaggggcaggaagagagaggctgctgagcacctcgtcctcaggccactctgccccgtttctaacagtctatgtacaacagacccacccaagatgtactctgtgacccagagtgggggtgcggtcctgggagtgtccactgtggatgtgacccaggtcagaaggagatggcagcttgccaagctaccaaggcacacactcaggacccaggaggaccgtccttcctcctccggtggtcggccacactcaccaaggctgcccctgaggccctcagagacccaggcggttctgagaagggagcctgtctctgaagcagaaaccacgccctttcacggggcccctgtgtcacgtcagccgcctggatgattcacagctccgcaccggactcggctcttaccgcctcatctcattgtctgctcactgcaacctctgcaaagcacccaaacccctgtcccagaagataggcaaagatcacagaaaaataagaggatgccaagagaatctggcacccttcaaggcatgacccgtggtccccagccagtactcactgcaagggtgctcttaggtccccttcccagtttgaacctgcaacctgggagctgccacatctggacctcagggatgtgaccttgccagccacaaaggttggcatcgggtcctgcctgccacctcacccacatgcgcctctgcagccaaccaaagccttccaagatgctggcctccaccgtcagctacatgccatgctgacacctccgatgcttccaccaccacgcagtgggtaaatcctaatcactcaggaacacaaagaaggccctgtgcgtgtagaccctgctgctcagaccccgctaccccccaccaggagaccccctgagaaaggagtaactgcttctgagccattgcccatatgggctggcattccccataaaaacccattgagggctccagaggcttctgggaacatctggacaatccaaccaccccagagagtagggtcacccctcaaatgggcaggcccagtgaggacagagcaagcgttacatatgtgtcctgaggtgggcatcaaggaggtgccacgagagccaggccccagtcttccttcgtgcttgaggagcagctgggtttgggggacagttgccctcagcatggccataaaccaccttgagtgcttaggatgcgcacagatccctgaatgtgctgtctcaggaaaatcctccaccttgctgggtctgacagaggcagctgcatgaaaccagcccacttttaactttagagacagaacctgatgtggccacggccaggctgcactagcccctcagggaggccccaggccagataagcactgcctgcatcttccactgaggaacatctctgggacgaggacccgtgcagctgcctgatgctcaggttcatcaccaacagcaccaagttgttcctctggagagaatgaatcagtcccttcagatcctcatcctcctgaaagttgagcacatggcttctaacaggcccaggtgcttaccttcggaacaacgggatcttctattacccagaaaaacaaagtagagccttcccggtacaatctgtactttcagaatccgaacactcaggagctgtgctcagaacctggctggcagggcctgctctgccccatccagctgtggtcccagccaccagactccaacctaccctgacaggagccctgtgcctgccggccccacctcactctggccacaaccaggctggcaagtgtccaccgtggtctctgcccagtaataacctcagcagtgtggtatggtgtggacatcctcacctggtgggcccatcctgagaaacatgcctgaaggcacccggcaggtgagcagggagagaggtaggtcccagcccgcctctccacctgggtcttatctcacaaaaggatcggccctgttattgggttaggtcgtgggtaagcgtacaccaagatccgccaactgacttcttcccagaaagatgcccgtccttcagagcaaacggcctgacaagaaatgtcaccaaactggactcctccccaccagcagcatagaacccagagcacagctcccacagagccaaaaggagaccacacagcaggaagcacgtggcactgccaagctggataggagctgcagaggcagcctgtgaccagcagggcatgtgctggccagggctggcccagggcaagtccccaaacctcagagtacccaggaggccctggggctcaggatccagggctctagggaggggctgcatgctcccagcatccacggggcgggggctagaacagaacatgctctgccaggtgctcagcgcccacacaccctcaaaagtctgatcgcagggaccttctatggaccgggctgtgcatcttgagggccaacttcaagcaaaggaaagcctgatcacagggaccttctatggacagggctgcgcatcttgggggccaactttaagcaaaggaggagactgaggctcagggaagccaggtgccttgcttaaggccaccagctcagtaagtggcagggcttgagctgaaacacaggactctcccaaaatgacgaggcaatggcaccctgctatgtcagaatgtgtcttttctccttccaaactgacaaactgactcttcacaggcgcaggtcatgcgtcctggaccggctgaccagagtcctgaactgaagctgtgcaggcgcgggtccctgcatctgcagaccgacttccgtcatcccacctgcagggggtgtggaggagccttgcctgacagccggagggagctggagtctgaaatctcagctgctctttttacagaacgttttgtcacctgccttcaaataaaagcgcccaatttcggctcaaggtgacatggattgggtatttgcctagcagctgacacacaccagaaagcaggagacagcaggagctctgccaagtgtgctgtggatctaggtcagaacatggtgcaggtgtgagcgagggggcgtcctcccaggaacgctagcacaattccagaagtttcaagagaatgctgaagttcagccaggtcagacaaccacttgaccgcggacagatttagagaaagtcatgcaggcctgggcagacctcgggctggccgccccgggtgctcccatccccctcatgttagcccctggttcccccaaccaccactcactcctgctgggacgtcaagagccccaggttcttggctgctgccatccaagacctgagcctctcccagccagctctggcaccttctctagtttcctcagaggggaatcttacccaagtatctattggatcactccctgcacaccccagctgcctgataaggccggcaggcttagccctgcagcccccagcagcccacgctggccccttcatggtactcacactcagtgctgtgtgacccctgtgcctactgcagtctagatcctcctgggatccacctggccaacacctcccccaaggcgtcatcagagaggctttccaactgtgagggctcactggggccccggcctctggctgtgagcatctcactgattggggtgcgaggttggtctcttcccacctaaaggggagttccaggaggagcagtccctcctgtttctgctgacccctggggctgatggcctagcactaggacaacagaataagggcccagacgcgcactgagcagagatatggagctggccctgaccacgctgtggagcccgtgctggtccctcaagcctccagccacctgcacgcggggccagccaggccaggtgagacacagccttgcttacacgccagctgcgtctgagagcagagaaccctgctgtcgccttctctcctggacgcaatctaaaacaatctcaacttacaaaaaacctgcaagaacagtacaaagaacagccatattctgtgacgtttctgccacctgcccctcccccccacccacgcctattatccacatacttagatgtagcaacacacttgcttcttgaaccatttgagggccggctggagactttgccacactgtgcccctaaacgcagcatgtttcctgagagtaaaaatactcttctgggccgacacagcagggaccagcttcacatttattattaatatgacacttcaagccaccgtctgtctcccaggtcattgcctgacttggtggtgacctcacattgtcctccccgcagcgggagcccatgggcagtggcacactgcactcagctgccctcatcagctgcctctaatctgcaagtttcttggccattcttcaacattcaatgtttttgggtaacatagacccctcctcactttcttcatcagagtgtgctggattttgggtctgcttggtgtctcctgagaccaaatgcatggtatcttcccggccaagagccacacagtgaccacggccctcggaaggcatcccaccctcatcagccgtgagctctgacggcccagacagcgctgccccgtgccacaaccctcctcccctcaaatctcccagcaggtacccactgcacacccgcagccccaggtgtagtgcctgccatctgcagtttggctatggtggccataaaaccctggttctatctccactggcctggggaggagccccctctctccccggtctcacacatgctcaccaccggcagcaggtgacattctcacacatgctcaccaccagcagcaggatggctagcatcacacatcaatgtggttaggctacagtatccagctgtttggccaaacaacagtctagatgttgccatgaaggtatttttcagatgagattaacatttaaatcagtagactgttttgttttttcctttgagacagggtcttgctctgtcgcccagtctggagtgcagtggtgtgatcacagctcgctgcagccttgacctccctggctcaagcaatcctcccacctcagcctcccaagtagctgggactacaggtgctcaccaccacacctggctaatttttttttttttttttttttttttttttttttttttttttttagtagagatggagtcttactgtgttgcccaggctggtcttgaactcctgggctttagcaatccttttgcctcagccccataaaatgctgggattacaggtgtgagtcactctgccaggccaaaatcagtagactttgagtaaagcagatcaccctccaacgtatgggtgggcctcgtccaatcagtcgaaggcctggagggcctctggcagaaggactctaggcttgagctgcaacatccactgtaacctaggtctccagcctgccgtcctgccctgcagattttgaccttgtccccccaaccccataaatgcttaagccgattcattaaaataaagatggaccaggcacaggggctcatgcctataatcccagcactttgggaagccaaagcaggaggatcgtttgagcccaggagttggagaccagcctgggcaacatagtgagaccctgtctctacaaaaaaaaacaaaagattagctgggtgtgatggcacacacctgtggtcccagctatgcaggagactgaggcaggaggattgcttgagcctgggaggttgagattgcagtacagcctgggtgaaagtgtgagacccagtctaaaaaataaataaaataaagatgactttatatttacctacctacctctcttctctctaaatatacatatacacacactccctttagattctgttttgagagccctgaccaatacagactcacaggctaccttttgcaaatggcctggagcacgacactgcccttaaagtcttcatgttcagattgtcccaggctggctttttgtactggctcctggctcttccccaacctcctctgagcccccactgagaccatgacactaggagaggatccaggctccacccggcctgttctggccacaccatggggttacctacctctgtgaggaggccacattcggtgacctggaagcttcctcatccgtcatggtgacgctgcttacagaggtctcctgcacgggacagctccccactgccctatgtgcaaggacggccattcctgcatggctcagcctaggggtgtccttgaatttgagtgggatgaaggaacatatctgtttttcataaactaaaacgtagcatttccttccatttgaaacataagcaataagctacagtggtatcagcactatctgtgcctctgacgtgctgttagtgcatccaacgatggctgtgctgctatctggaaatgccacttcagctcaccactaattatggcagtgagactcgctactcaatctcattattaatgtgttaaaagagtcaatctgttactgggtcacatatttcttttgagcgactgataactctcctgacacacaagtgtgccctctcctcctctctgccaaaggcatccccagacctctcaactaccaaggaggggaggtgacagaagctgaagctggcagagggcagctcaagtcagaaagcagggctggagtccagcagccaggcccaggcccagctccactgccctctaagcggcatggccttgggtggatgagtgagcctctctgagcctcagttttctcttctggaaaaatggggccgtgaagtcccactggccaggctgcgatgacaccaggaaaagctaggacaagttcattcccccactcctctcatgattcctcccctccaaatgaaaagccatttcatttgcttcccactctccaaatgaaaaaccatgaccttgtcacctgctgctcctaatccccaggtggcttctaaagccaacagtgacaagcagagggaagagcaggctgccttcatcttcccctccgagaccagaccacaagggtgaccgagaaggaaagatggagcttatcccatggagacaagccacttctacaagtccagggatttgtctgagataataaaggaatggggctggggatcccatcagggcaattcagaaaccctggtgaaaagaagggccgctgtcaccacagtggcccaccaggccagggggaagctgtgcccacaccttccagaaaagatgggctctgtgctgcggccctgaggggcttgccctgggccctgggcagcataacaatgcatctggcccctctgaagccagggctgtgctgtcactgctggccagggcagggagggctggctccccaaatgcagggcctggtgctccaacttgggtggaaaacagagaccctgaactgggagtgagctgccgcacttgggaggagagagtgacatgaacatggtgtactctcaacctctgacccataccggcaacccgacaggcaaggcacgcagaacgactgcagccagacggccccacactccacagacgcctggaagggaggcgtgtgtccagctgtctccacctggactcccaaggctcagttggccctgcctcaggccctgccccagaagtgcccagctccctaacaggggctagggaagaaagtggcctacaggcccaccagcaaccccatccctttctcatggcccgggaaaggcctgctgggtcactgaccactcctcatagctctttgctctcttgtctgcacacacagatgtccaccagtggggacaatcctgaagacaattgaaaggtgatctaacctacgagggcacagtaaagtgagttcatggcctcttgtcccaagcaggtagacagaaacaacaatcagtaccagaaatccatccaaggacaggcaggtccacacagaccagaggcccccaagatatctccaggtctttctcccttattccaacctcactcctcctctccactgcccagagtgaatcgccacaaaaaaaagtttctgtttggagactgaggtaggaggatcgtttgagcccaggagttcaaggttatagtgagctgtgatcaagctactccactccagcctaggcaacagagcaagaccctgccacgaaaaaaattttaaaaagaggggaggggaaggggaggggaagggaaggggagggtcaaagagagagagagaaaaaggagagatttggatgtagacggtgccagccatgacagcatcagctcccagcccacgtaggaaggaaaggaagaaagttagtttcttttttgtttttttgtttttttttttgagacggagtcttgctctgtcacccagatgggaatgcagtggcgcgatctctgctcactgcagcctcctcctcccaggttcaagcaattctgtcacagcctcccaagtagctgggattacggatgcctgccaccacacctgactaatttttgtacttttagtagagacagggttttgccgtgttggccaggctggtctcgataatctgacctcaagtgatccgcccaccttggcctcccaaagtgctgggattgcaggcatatgagccaccgcaccaggccagaagttaatttctgattcccactctctgccctcccctccccctccccacctgtgctgatgacagaccccactgtccagccttctgggctctgaccaggtggggcatcttcctgtctctgccttcagagcttgggaggccccacccgtacctgagctggagcctcaccttcctccacttccctagccgggtggcatctggacaactctaccctgtacctctaggcagatgtgatctcagaaccaccatgtgcccaggatttgagagttgaaaaagacagcaaggcagaagtccagggcatatggctggcgctaactcaatcaaggtgtgggctataacatgttaggccctgggaactcatcagccaaggagacagatgtggccctgcccattcagagcccctgggcacaaatgttggagtagacaaaaactagagtgacacagggacccctggcagggctgttctaactgccaagggttagggaccactgagccgagagccgagagcagaagtgcaggaggcgagctgaccccaggagactgcaggccttgtggggtggtctgtggaggagtggggagggtcagtgtctggcatgacaaggctcgggagcatctgggggagggcctggccccacgtgcacatcaccagcaccctgggctgctggggtgtggagaggaactggcaacagcagcaaaaagcccaagcaggagttggtgggccccaccattcccacccactcactcgcatccccatcagggagggcacaacacccacccagctgccctgagtagcacagcttgcaacttccttgcttcaggcgtcaggaggaccctaaaggcttcttggaagcagcgccccgcatgagggtgcccagctcccactgcagctgaaggaggagggccgagagcctgcggagacagggctggtaggcagagtgacaggcggcagtggctgccccactgaggagaagaggaggagccacaagccctggctgagtgagcagaagccagtccccctgccccctgtacgagtggccactctggggcagtatgcactgcagtggagggatggggaggcaggcaggtcccacgcgcctcagcttcccaatactgaccaagacctgggctgtaggggagacttggacatggacagcgccagccagggcaggcccactgaggcctcttctgatcttaccttggactatgaggcttagggtggagggctgaggagcaggctcccgccacatgggcctgaaaggggctagcctccgtgagcccctaccctacctgctccacacagtgggcgtttggaggtgatgtgggaggtttatatggggactgcagagggcgtggagatgcaggcacagtgccaccgacactccactcggtccccacaacctcccggacagatggggttactccctccttatggatggggaaactgaggctcaggtgaggccatggctgcgccccacaaaagcacctttcagtactactgggccaaacattagaacttgataccagagctgtgacggccatgcctgagtgtgtgggcgtggttgtgaaaagagccacccgtgagccccaagaggtggccgggccactgcctcatccagaaaactcccctgcatgcaggaagagctcaagggctgctgtgcagagacactgggtgaggaaagagctcaaaatctccctgagggatgactcaggagacagagacctgaccagactcagcctcacactgcacccagagtgcttcctctacttcctgtggtaacagagcctgtcttcctgggctcgagaataaataaaaccaggtcaagtgcaggtaacaacttttttttttttttaccttattagaaacatatagtttggcaggagctacagagatcatgggttggaggcgtggagtagggttggggtttggcacaagtccaggcacaggcccttccccagtgtcccctgccagcaggtggggccagctccaggctgctgctgtccactcaggtggtgcggactgggggaggtccttgccaaggccaggcgggtagcacaggaacctgtggctgtggcccgtcataccaagtcttccactatgggcaaacatcacttcaataatataaaaaatccagaaggaaaagtctagtctgaaatgacaatgagataccaccacatgcttattagaatgcccaaaactcagaacagacagcaccaagtgctggtgaggacatggggcaacaggaacctcattcactgccggtggacatgcaaaatggtgcggcctcaacagattcctgaaaaactaaactaacatactctcaccatccaatgcaataattgcacgccttggtatttgcccagaggcactggaaacgtgcgtccacatgaaaaatactaattacagcagctttatttgtcattgcctaaactcagaagcaaacaagatgtccttcagtagatgaatggataaataaaccatgtcacatccagacaacaggatataacaagaaatgagctaggaaaccatgcaaagacatgaaggggccttaaaagcatacgactaaatcagccagtctagaaaggctgcacactgcacagttccaactacagaacacgctggagaaaaacaaaactatggagacagtaagagcatcggtggatgccagcgggcagaggggaggaaggggatgagtaggtagagcttggaggatttttggggcagtgacatgactgtgtggcactaccatggtggacatgtcattatacatttgtctaaacccacagaatgtacagcaccaagagtgtgtcccagtggaaactcagggctccagatgataaagacgtcaggctgggtgtggtggctcacacctgtaatcccagcactttaggaggcctgggtgggaagatcacttgagcccagagtttcagaccagcctgagcaacacagcaagactgtctaaaaaaattttttttaaattagctgggcatggtggcatacacctgtggtcccagctacccgggaggctggggtgggaggatcacctaagcctaggagatcaaggctgcagtgagctatggttatgctactgactccagcctaggcaaaagagtgagatctcatctcaaaaaaaaaaaaaaaaaaaaaaaaagatgtcagccagatgtgatggctcatgcctgtaattccagcactttgggaggctgaggagagcagatcgcctgaggtcgggagttcgagaccagcctgaccaacttggagaaaccctgtctctactaaaaatacaaaattagccgggtgtggtggctcatgcctgtaatcccagccactagggatgctgaggcaggagaatcacttgaacccaggaggtggaggttggatgagccgagattgcaccattgcactccatcctgggcaacaagagcgaaacttggtctcaaaaaaaaaaaaatgtcagtgcaggctcatccattggaaacaaatgtgccactctgtggggtggatgggacactgagaatgggggaggctgcaggtgcggggaggcggggagaagtatataggaactctaccttccactcaactttgctcagtattggccagagccaacccggatcactaaaactatttctgacctaaaattagatttcgagaagggcttcatagtagcaggacctgacgggaccctagggcagtcgcctcagctagaagacaaccaggaggtctattcagttaggaagggaaaacaaaactgtctttctgatgccaggcagctgcactcaacggtgtgagactgcacagtaccatccaaactcctggatttctatgattctgggaaaacagaatcggcagtgtcacgaccaggacagaaggtccggtttagcttcagggaccctgtgagaccctccccaatgaccagcagctgggctggcctctcaggacattgctgcccccggatgggtagacaggctgggttaagaacacagaaagctgggtgtggtggctcatgcctgtggcacttgggaagccaaggcgggaggatcgcttgagctcaggagttcgagaccagcctggacaacatggtgaaaccctgtctctactaaaaatacaaaaattagccaggtgtggtggcaggcgcctatagtcccagttacttgggaggctgaggcaggagaatcgcttgaaaccaggaggcagaggttgcagtgagtcgagatcacaccactgcactccagcctgggcaacagagcgagactccttctccaaaaaacaacaacaacaacaaaaacccacacaaatgtgtgcactagggacaaagctaaaggctggctccctcctgcacgccaccctaggccactcattctcaagcccaggatgccaggagggaagcctggcctcagccttaaagctgaggcagctcttgaggcagtgtcaacgacctctcctagctggagatcccagcagcacacttcactcatcccagcagggatgggagggctcaacaggaatgacacaagggccaccagcagctgctgggaagtgaaagcaaaacttctatcttggggcccaagaactgagatcagaagattcacttccaacttatgatctgccatttaaaagctgtgtgacctcagtaagacacttaacctctctgggctttgtcacacagggtgatgatctaacttgcaaggctgctgaaacaacatattaacagcacaaactggaccctaacatacccgtgacctccagcatctgcctgtaagcttctaaatgctggaaataaagcaacattctttaaaacaaaacaaaacacaaatacaaatcctgccacgaggaagggggcaaggtctcgggcccctgtagacttcccagggttggggagatggtccctcagcccaccgtgtggctgtgaatgatggacttgacatctgaactcatcagttttctcatctgtaaaatgggaataaccccatcctccctttcaggggccacagtcagggcatgagtagccacagccacaccacctcacggcatctgctcccgagacagaggaacagaggggcacaggggacaagggctgggagaaaggacactggggggctctctgggtctctaggagaacccaccagggatggctgatgggacaggccccacaaatggaggaagagcggggccgagggagccatctgaccacagaacatgctcagtgacctttctcaaaactgcatcaatgaccccaaataatatttagcaaggtgagagcaaacccattaagtgcttaagcaaaacacgaggccaggtgtggtggctcacgcctgtaatcccaacactttgggaagccgaggcgagcagatcacttgaggccaggagtttgagaccagcctggccaacatggcaaaatgccatctctactaaaaatacaaaaattatctgggcatggtggcgggtgcctgtaaccccagctactcagggggctgaggcaggagaattgcttgaacctgggaggcggaggttgcagtgagctgagatcgtgccattgcactccagcctgggtgacagagcaagactccgtctcaaaaaaaaaaaaaaaaaaagtgagaccaccagccacgttcctgttcccgccttcctcactcctgagacaggtgtgaccatgaggcttcctgtgcatatcgtgggtttgtaaatgaaccccactgggctgtaccaagtgcccttcaagaggtccacttctcctaccaccttcacagccgctccatcaactggctgcttgtgacatttgaaatcttacacacagaatccagttttctccaggcaggacctggcacagctttgttcccagagagtccattctcacaaaaggagagacgggaactgggaggttccctcaaggaagcagctgtgtgttggggccgatggagaggtcgactggtcccctgggaaggtcggcataacactggtgccctgcaacctcttggcgagctctccctgtgccaggccccgggcagcatggcagagggtggtcttgggctggaacataccattgtgcaaaatagctctgggaactgtcaggggccatacaaagctcactatttttcaactcaaaaacactgctttagctttttaatacgtcactgaggtacactgaagcatacccaagactctcaaaaacagcctaatacagtttgagtgcttcaaaaaataccagccaatttgcacacagatcacactcaggaaagtgaacacatggcggctgctcgccaaattcaactccacagagttgactctgtgactccacagagcagaacctgcagggaagcaggccaacctccaaccaccgaacttgggccaaaactcacagcaggagaggcaatgccgtcccatcccaagcatgtgggcgcacacccaggagaagaacgagcgggccacgacactgttctcgccagctatgcctgtgggcagcaagcagcacacctccaggggccacgtagacaacctgtgacacagtgaaccccactccacgccaaaccacccaatgggaaacagtggtgagcacagccatggaccacagagagtaacgcaagtgggcaaaacacatgagaagccaccaagcagacccggatgagagcaatactgtgtgtgcccagcaccaacaccaaattaagaggaatcaaaaaccctgctgagcgagagaacgtgggaaagggcctgggatgggcccactgttggcgaggaggggcccacgcctcaacaatgaggcggaccctccaacgtgcctcacacttcaaggcagctcttccaggccagccggggccttggagtgaggggccactggcagaagggagcaagacactggtccacggcacagccagctcagagccaggcggatgagacgggggccaagccaggggccggctactcacgagtgcacacgaggacagccaggattcactaggacaggatctgcccaatcccaggcacttcccactggtccatctgacacacctgggggcccaagaggtgatggcatcacataaaagcaaaagaaacttgaaaccaccaatccaggcaaattcggactctcccacaaatggtccatccttggggagcatctcccccacatcctcaacctccagctacgtgtctgcgggtgggcaggaaggaggggaggcagcatgggcaccagtgaccaggacagccctttccaaaagaaggccctgaacacagtcaagaggaagaggaagaaacactggggcctggcgggcaggtcctggggcctcatgagggtggtttggggtcagaagacacacgatcaggaaccaggcgtcacccccagaggctgctggagtgcgtcccacagaggcatgagcagcacctggcatggggacaaggagcttacagcaagtgggaggtgctctggtgctctacgctaagctgcctggtgccccacagctccacggggcaggagcacccgggaggctcctaccaccacagccagatagcccattgaggacgcacacccccagtccagcacccagaggtgaatgaaggattccaggacagcaagggagacacatgaccaccctagggtggaccatggaacagctgtgggtacacaaaggctccctggagccatcatccgtggagagcaccaactacgtcttctgagttgtgggcaggccaggaggggagggaggtgtcccaggtgagggccaggcctgtggtgactgtgcctcgcagtgggcagggctgccagaacccagcagtgagctcaccttagtcaattctgccagcgggcacccccaccaccagggaaatcctgcaaccagccgcatcaggagcagacgtttataactaaaagatcaaatatccccaaccacaaaagtcccagtaatccacacatgggacttcccaaaatcccatctctgagagatgacaactgaagaagccgaggaggaagagacggtgtttaaatgagagagagggcccaatgacaacggacaccagacacctgccacttgtcatgttgcagatgccaggaggaggagtgggaacacggggtggcagcatgggttagtgttctgcaaagaaacccaatgaccttcctgtttttgcttctgagacaacttagggaaggagttttgggccatcaatgcggaatccaaaagcccctgtcttgggaaaccacggggccacctggccgggtgtgccaatgcccagcagagcttcggttattaacagggcaggccagcgctccaggcaggcagctcggcacttccagtggctgcacacccaccacacacaggcacagggctgggaggcactgctcggctccctgggccctgccagagtggctccctatcacttgcttattttataaagtggcactttacagctggtttaatgtggtaaaacaggaacctggcttaaaaagaaaagggaactcgcactgtgccaggctggcacccagcgcagggacatccctgtaagcatccgtggtctggagagtgtccagtggcaccgcccgcccagcagtcagggccgcgggtatctttatggcatctgggagggagcacccccaccctggggtgataagtgggatgaaaagaaggtgacagagtttttctgtcttatttctggaaaaggcaactggcaaagctggagaacagcaagggagtgaagcagacccataggagcgagggagccccagcaagtggggggcacgtctggccaggctctgaggaactgagctgcccgtactgggaatcccaggcaggatgtgggctcttggaggtgatggaacagacagaacaggctattgcaggacacacgttcctcctcacccggccccaccacatgttcatctagtaacagttcaccaagtgagctgatgtggccccagacacccagagctcagggtacgtgcagagccacggctgctgagcactcaggggctgtgaggagatgtctgagcagtggtgggaagggacgggacctgttactctggccacctggagccagcgggagtggagaatgggctgttcccaagcacccgcctagggctcagaaacaccacccttccttgggtcctgccgagcttccctcctcagggagccttccctgctgcaggctggatgagggcccacgggactgtcactcatcactcccgttcagaatgcacctggctaactggagtcacacgtgggggcctggctgctgcctggccaaggttaaggacacacactctggccagacgctaggtctgaccccactcctatccatgtggacaacccgctcactcacatccccccgcctgatccaaggggctcactgaagcactgactcctcggcatccagggaggcctcgcctggtggctgcagcgtgcagaggatctgcgggctgtcacggcggatgcaggggtcaactgtgctggcacctctgctaagcatgcatcacttcattttggcctcctcagccacttgtgccaacaggccagggacggcacagagaggctggaggggtgaggctgaggaggaggggaggtgggcaaagggcatctgtcagccatctacctaagggtgtgctcactgacgcacagaggccactcctgctctgtttttccaaagcaatctgtgactctcgggattacccacatctcaagtcacatcctgattgaaatccatgacgcgtggcttgctttgctaaatttcccctacattttctacagagctcagcattcttcaactcccatctgaaattgccatgtacatctcatccctgtcacgttcatctctgcctgggaggaaggggaagtggctacagactccagaacctgcagcctgggtccggtcatcagagcagtgatgctctctgtcattggtcagcagaggttaggcccacctgtcaggcctcagaagagcctggcaccgcccacagggtggatcaacgggttaataagtcacagcagaaaacctgaggctcgactttaaataaacagaactctcccagctgcatccctgccaaggcccgagagtgacactggcacatgagctatatctccccccaccaacacaccccatgggctgtcatgagaaacactgcatataccagaacccatttactctgggacactctccacggagccctgccaccacctgtccagtggacagggcctgagggacacaaagcccccacagccctgagcacccgaggagccacctggcctggggatgtgtgatgcctgcgcacaggaggctctcagcccacagctccagcagaggaaaaaactcttgccttgtggagacaacccaggctttgactattctgggctgccagggctgtgggagcagcaggtcaaggttcaggacatctcaccctcctgccatcatggccaaacctcaggcgactgagaacgatgggcaacttctgtgtgccagagggcagtgacataccaggacatcaggggaacacaagccactgtcccgtagcccccactcctctcccatcctctcctcccctcccctctcctctgtggtgtgctttcttctgcatctgccacagctcacccaacagcaaatgcaatcccaactagttaggctcttgttaggactgaagatagcttttgctattcttctctactcaattcttcatcctaaggatgctgtggccagtcacaccctcccacgggcaagggcacccggcaataagccccagctactgccattactcatcccacttcccaggcaggcaggaaggcaggtgtgcagagcactgggcagggccatagtacctgtgccacacacacacatgctcttcacctcatccagagtttcctaggttttggtgcttcaacagccctcagtaacgcaggctccttactatgagatagcctgggagagagctggggtttctgtgatgggaaagggctaagccgggaaaggaaacagtgtgtgactggcgccttgcaagccacctaaggcaccaggcacacacaggggaggggagaagaggacgggagaggagtgggggccacgggatgcggcttgtgttcccctgatgtcctgggacacagctccctgaaccccaaaacaccccacggacaggaaagcaaagtaaggagaggtgaatgtgagttgcaggaggggctgcaggcactgacctgacctcccacccacaggatgaccccacacagcagagggagaaactgaggcccagagggtggcaccactgtacagtcaggtacccccaccctgtgtcctgctctgtactacacagaccacccagcacacatgtggccaataccagtgaggcaaaggtggcagcctgggccccccatgctggccctcagccatccctgggacaacagtctagacacccagaagctctgcacctaggcccactgacccagcctccctccaagccctgggtgcccatgtgtgcccaggctgctgcccctggcactcaggccatgccacacgcagcagctgggtctgaagcctggcttggaaccagccccccacagtcaacatggagacagccctgctggcaccgccccaggcctgggccctgtctcccgcaccctccagcgacctgcctgggccaccctcaaggtgcgcctgctcctaagccgcctcccacagtggagggacacccgggctgcttcagagcagactgtggcaagttaccctctcccccagggggaaagggatccaaagctcctgtgcctctggggtgcagcatcagcccagacttctgctcggctgggtgccatggctcacgcctgtaagcccagcacattgggaggccaaggcaggaagttcgtttgaggtcaggggtttgagaccaggctgagcaacacagggagactctgtctccatataaataaaaaattagccaggtgtggtgccacgcacttgtagtcccagctatttgggaggctgaggtaggaggatcacttgagcccgggagccaaggctgcagtgagctatgatcacaccactgcaccccagcctggatgacagagcaagacctcgtctgaaaaaacaaaagcagacttccgttcaacagcatgtgaacctcaccttgcacacctaggagttcgttaccctcctcagctcagagattagagggaactctccccacagagatgctatgatcagagggccagggaccctgtctcattgatcctacgctctacgccagacatcgcctcagaatccttctcaacacggctccacttcctatctacaaggagctggcctacaagatggaagcgattcctacattatggggtcatgtggctccaggcacatggccctcgaccagtgggagcctgtgcacaggtaagagagccagggcagcctggagatgagctggacacaggctgccagcactggctgtcccctcccacttgccaaatccagtgtgagctgagcacatttcactggaacaagcaggcgtctgagagcatccaactccaaaaatagtgccaccaggagaggaaggaacacgctcttctagctgcacccgctccctgccctcagatacctccctgcacagtctgtgcctggcctgtggcagttcaagggtcacacccaactctgaaaagggagagataacatccccagataagaagagtgaaaacaggccaagtctgctgccagagcctggccacagacccacagccccttggcagagaactgctcaggaagtcctcctctgagtctttcaagccactggtatctaacaaagaatctaatctgcacacggcacttgccccgagctaagaaagttctggaagggtctcctaggtctccccagcccaaggtgagcttgcttctgtggagggagatgcctgcctgcccatgtccaccaccactgcacaccaagccagtctgaagccaccatgatctggctgttgctggtttatggtgcacctccccgctgcgaagaagtgggccatgtgagcgcaggggcttcatccctcctgcttcttactggagaaacactcctggaggcagccgaaccctcactgggtgcaatccctctgtgtaggagattgcactgtgtaggttgtgccccgccgaacaaccacgcagctgaggctcagctcagagactgcattcagagcccaactagaatcagacacaggttctgcgggccccactacccatctggaggcagacgcctgacccccagctccatccccagagatgaggatgcagcaggctgaggctgactccatgcggcagctgctcccaactccacaagggacacacaagccagcccttcccatccaggctgcacatgactgtgttttgtttcaaaggtcacatacaggtcacaaataaagaggccggttcccactggaggctatgtcaggattgatgcagtccctgagaaaaactcccggaaaacccagggactcccatgcgggctgagaaacattttgagtttgcatgagatcaaaataggagtcacagctgagtgtggtggctcacgcctatagcactttgggaggccaaggcgggaggatcacttgaggccaggagttaacagactgcagtgagctatgatcacaccactccactccagcctggacagcacagcaagaccctctctctaaaaaataaaaacaaaaatagaataaaataaaatacaatacaagagtcagcagccaggagggtagcctgtcccagagtggatgccctcaggttcaaggtttgacatcatctgcactaactgtgtgatctcaagttagccattatcttctagatgtcccattagtgaaataaaggggccagaacaaaaggaccctccaaagtctcaactggccctggccaacagcaaggcttcacagggctgcctggcactgcacaggggcctgggagcccaaggcccgagcctggccccacgacagtggttccattaacacaccaactcttcctgccacacacccagctggacaccctagaccagcggccagcaagcttcttttatgaagggccaaagagttggtatttcaggctttgtgagctagacagttgcagccttggctgccgtcacagggcaagagcagccataaattacaggtaagcaagtgggcagctgtgtccctataaaactttatttacaaagacaggtggcaggccagacccagccctttggccacagtttaccaacacgctatagtctctagggttgctgctgaaaaagatcacactacagcccactctgtccgcgtcctaacaaggcagcaagccttgttgtggggataagcaactatagcagtgaccctgggcagagcctataggcctcagtttccttgaggacacaaaaagagaccctgtgagtcacctctaccactaattccatggggaaatggagcaaacatgaggtggacgcagcccaggttcccctcaagatctcgggaataatatttcagagtagccgtgagcaggaggcacccaccagggcccttccccacagcagccaggttggaggtcctgtgaaccaggcgccctgatgcaatccagcaggcatccttatcacagtgcccactgagaccctaaggtcactccctccaggtgtaggggctacaagatccacagcaggaagctcattgtaccccgaaaagtcactgttttcagaaaggaaaaaggaacttcccaacccagcttaccctcctcaggcctgtgggaggagacaaggccaccccaagccctttgggttcctggtggggagtcacccttccgaaagaagggcaatgtgatggggtggccgcccccacccggccccttggcccacaggcccccactaatcagcctaccctggatagaggggcccaacctaaggtctccagggtgaacacagatggagacacaggccaatgcacgtgcgcgcgcgcgcacatacacacacacacacacacacacacacacacacacacacacacacacacacacacacacactcccctccccaactggaggcctggggctcctcctggaagtaggtggattccacctgcccacaggatcctaagaaaactctgctcctcctcttccctcccacccaccttcagcaaatgcctcagggctaggccaagggcagcagctggacccccccgcccagccagtgccccccagtgggctgtccctgacctgcaggacctccaggccacttctcacctggaagagacctcattttccacaaaagcttaatccaaaaagggctaaaaatagagattctgcacccatctgagctctttgcctgagaagggccctgaagcctcagtacctgcagggctcagaagtcctgccactgagaggctcaaccaccctggccaacctcacccaaggcccttcctaaccctcactgcttacagaaacccatgtcccagctgggcacgatggctcacgcctgtaatcccagcactttgggaggccaaggtgggtggatcacttgaggccaggagtttgaggccagcctggccagcatggtgaaaccccgtctctactaaaaacacaaaaaacttagctgggcattgtggcgcaagcctgtaatcccagctaatttggaggctgaggcacgagaattgcttgaacctgggaggtggaggttgcagtgagccaagaatcacaccactgcacactccagcctgggtgacagagtgagactcggtctcaaaacaaaaagagaaacctgcatcccaacacaggccgggcaaccgcacactggctatgcagaagcagggcacgtagccactgtcatctccactcagccccagcttccctcactgcagagccacaccgggctctccctgtccctttctctcacctgagcccaggtgatcctgctcgagaccttcctctgtcacctgtgaccaggtgactcctgggtccatccaggggcatcagaggccctgcaggtcctagctctcacaggacagtcacatacatgagggcatttaaatggctccaagaccaccccacacccattaagatggctaccatcaaaaaataaccagttcgggcaaggacgtggcgaaaccacaacccttgtgcacggctggtgggaatgtaaaatgctgcagccgctgtggaaaacaatctggcaaatcctcaaaaaattaaacacagaatgaccaaatgaggccgggagcagtgtctcacacctctaatcccagcactttgggaggccgaggtggacagataacctgaggtcaggagttcaagaccagcatggccaacatggtgaaaccccgtctctactaaaaatataaaaattagctacgcatgggccgggtgcggtggctcatgcctgtaatcccagcactttgggaggctgaggcgggcagatcatgaggtcaggagatcgagaccatcctggttaacatggtgaaaccccatctctactaaaaatataaaaaattagccaggcatggtggtgggcgcctgtagtcccagctactcgggaggctgaggtaggagaatggcatgaacccgggaggtagagcttgcagtgagctgagatagcaccactgcactccagcctgggtgacagagcgaaactccgtctcaaaaaaaaaaaaaattaacttggcgtggtggtgggcgcctgtaatcccagctacttgggaggctgaggcaggagaattgcttcaacctgggaggcagaggttgcagtgagtcaagatcacgtcactgcactccagcctcggcgatccaacaggtctacttctgggtatgtatccaaaagaactgaaagcaggggtttgaacagatacttacatgccctgttcacagtagcatggttcactacagtcaagaggtggaagcaacccaaatgcccatggacagaggaatggatgagcacgatgtggtccatccacaccacaggacatcagtctggttccctgcccactgcccaccacccaccataccaccggagggggcctgatggagaaggtggaagtacagggggccccagctccctctgacagtgctgtgggctttccagtgggaaaattgctaaagaaaccaggaagctggccaggcacagtggctcaagcttgtaatcccagcattttgggaggctgaggttggaggactgcttgagcccaggagttcgagaccagcctgcgcaacacagtgagaccctgcctctacaaattaaaaaaaaaaaaagggccgggcacagtgactcacgcctgtaatcccagcactctgggaggccgaggtggatggatcatgaggtcaggagttcaaaaccagcctggccaagatggtgaaaccccgtctctactaaaaatacaaaaattagccgggcatggtggcagatgcctgtaatcccagctactggggaggctgaggcaggggaatcgcttgaacccagggggcagaggttgcagtgagccaagatcatgccactgcactccagtctaggcgacagagtaagactccgtctcaaaaaaaaaaaagaaaaaaaattagttgagtgtgatagcatatgcctgtagtcccaactactggggaggctgaggtgggaggatcgcttgagcccaggatgttgaggctgcagtgagctgtgatcacgtgattgcactccagtctgggcaacagagcagaaagctccgtctcaaaaataaagaaataaaaataaagaaacaggccaggtgcggtgactcacgcctgtaatcccggcattttgggaggccaaggcgggcaggtcgcttcagctcagaagttcaagaccaccctgggcaacatggtgaaaccccatctctacaaaaacatacaaaaagcaaccaggcgtgatgatgggtgtctgtagtaccagctatttaggaggctgaggtgggaggattgcttgagcctgggaggcagaggttgcaatgagccaaaactaggaagccagttctctatttcagaaaaaaaacaataaaaccctaacagcagagctataggagaagctattttaaattttggaggctttgctttctgggatcattttttgggtcaacgaggagagcagctgacacctcgtgcacagccagggagaacaagcctgtctcacctctaggacaacaccttcacctgaattgggaagttgaggctcagggagggtgccagcagcctggagccccaaattgtcagtgggagcagcgccaccaatgtacctgatccccaatatgcagttctcagcatccttcaagagagacgcctctttgtgaaaacattttcaccaacatataaaaaggacacggggcgcaacaacagcatctcatgaagagctgaggcccccgatgggcctgggggaaggacaggggtgttaacagtagggtatatacttgcggtctccccatctgaagaacggtgagaaggactgaccacagccctccatcaccagcagctcaatttgtccaaagaggagcaagccaagcggggctgagctgccttccctggcctcaaaatcgcagcctcatactccaggctccactcacagacacatgggcatgccaggccgtggcctgtgctgggtcacctgcctcacctcacctcatcgctctatgtagcctcactacgggacagtggactggcctgtacacacacaaggcctgcagcatccggacatccccagaaccaagcatagtgccaagaacacaaaaatgcccgaagaatactgacctgtcaggctccacgatgcacagaaggtgcagcattaaaacataaagtgttcagggaagaagagacgcaaaaccatatgattgtgccactatgacaacacggtacacccaggcgagacagaggagggtgcaaaggtgtcaacagaaattacctggggcaatgagaacagacttgctaattttaggtacattgcaggctttctaccctgagttatactgcttatatagtaaaaaggaaaaaaaaaacttcacaggatgcttttaaaacaggagttcaggctgggcccagtggctcacgcctgtaatcccagcactttgggaggctgaggcgggcggatcacaaggtcaggagatggagaccatcctggctaacacggtgaaaccctgtctctactaaaaacacaaaaaattagccgggcgtggtggcgggcgcctgtagtcccagctacgcaagaggctgaggcaggagaatggcatgaacctgggaggcagaggttgcagtgagccaagatcacaccactgcactccagactgggcgacagagcgagactccatctcaaaaacaaaacaaaacaaaacaaaaaaatcggaattcagttattccacaaacttgaccagaactcgaagccctaccccttcacaaacacatctgctggcctggctgcctcagtcaggagccgtgtctccacttggtcaggagggtccagccctggaggatataattagcatcagactctggggcccactgccaggtcagatggaggcgggaggtctctaggacgcttttatctgggagaatagtctccctgcggatggtttatttggacaccagcttttttcattaaaaagcaaagtgacagccgggcacggtggctcgcacctgttaatcccagcactttgggaggccaaggcaagcagatcacgaggtcaagagatcgagaccatcctggctaacacggtgaaaccccatctctactaaaaatacaaaaaaattagccgggtgtggtgacgggcgcctgtagtcccagctactcagaaggctgaggcaggagaatggcgtgaacctgggaggcagagtttgcagtgagctgagatcacaccactgcactccagcctgggcaacagagtgagactccatctcaaaaaaaaaaaaaaaaaaaaaagcaaagtgacaaaataaccacatgtcatggccatctctgtcattcactgcacctgcaggtcacaggccatttggatgcattgttctacatttccctttggactctgtggctgactacacaggtgagattgaagacaaccctgtccatgagattcagagaccaaggagaaagtgtaacaactgaattcatcaaggcagaaagcacaacggggagcaagaccctaaaacaaaggacacagaagaggccaaacccaaaatgtgcagtatcaatcacaagtctgtgccctgccaggtgccttaaacaaggctgatgccccctgagaagcagacctctgaaaactagggtctcttccctgggcagctgcttcgagcccagggctacgtggagcagagaggcaatcctgtttgtcaggctggcgggttcctccctcaaggtctcccagtcgggatgtcacaatccgggtgtgatgtcaaaactgcttcaaaggtgatgaactacggccttggccgtgagtcaacagaggggtgggtttccgagtgagcgctgcctgctgtttacacacaatcacagccacggcaaccagctgaaagcacagtcaagggtcacgatgccgagtgcagagctcagtccctcacacacactcttgcctgcctcctgcagagactgccagctcgggcccacagactcaagctggcttgtcctcttctagcaccttctgggagaatccacccagaaccaccaaatgctcaccttgaaacacacaggcaaaccataccctggtgcaccagtgggccactcctgatgcctcctggcagcccacctgttccaccccagcccatccagcggccacagtccttcagaggtggcagagcccaggccatgacacttggattctgagttctcagctacttcccagctgggagatcctgcctggtgattcagcctcctccagagtctccacccatatcctcacctaagaaatgggaactgctcccaccacggggaagatgggatgaaatgcagtactgtgggtggcacagccagcactggcggggtggggcaccctccacaggtgtaggtgcccatcacctttccactttcttgggggagggggtccagcatagccagcaaccggaggaatctgctcagtcactcacgtcaccaaggttcgggcctcttggggacgcggaaagttgcatttaagtgaggctcaggaccccagtgtgactccccttcaggtcaagacccctgcaacctcaaaagatagtttggcttgagcactcaagaggcagtatgggccagtgaggacagccgagcacccttggacaggtgatgccgcctctcagagcctcatctgtccctgtcgtgaagggggaccataaacttcctctcccggcaagtggtcaagatgatgtgcacccatgggaagggatgggggtctagcccagggccaacaggggcagcactagcactaggtctctaaagaaggccttctctgaaaagcaggcagggctggcaagaagctgccctgctcagaaccaaggggggtgcccaccgggaagggaagataagtcgggcctctggggccctgctgtgagaatggatcacaggctgaagtaaggctcctcctgccaccggtgccaagggtgacatccacacagcccacccacttagcagcagacagtagcccccagcacagctccagggccacccagaagagctgagtactggccacaggcctgaggcacagcacccctctacctccactcccttcacacccttccctgcgacagcacaccggccatgcctgggacccttcccccagcagactgcagctccgtgtcacctgctggaagcactcactgactgccccacctatacccctcaccatcattaacgttgaccgccggtgagttactcttgctaatttctgtgccatccttcctgttcatgaattctgtctcctgccactagaatgtcagctcgtgacatgaggggcccatctcaatcactggtgggtatcccgccctgagccatgggcactgaccagaggctcaatcataccaggttagatgagtgatctggagtctcccaccggctctgtacgaacctccaggcagggaccagccccccaggagccagctctgggtccattcactaagggctcagagcacaagaggggtcaggttattctcctcccaagaggaagagaatctggaactcagaaagggtcaggcaccaggatcctcacagccctgagagaaggatctggaacttgagggagcaggtcaagtactgctgaccccagttctgagaaggattcggagatgggaggggtcaggcactcacccatggcctcaggaggcaggtggagctgagattcaaatggagagaggctctaatccccaggcctcctgaagcacttcctgggccctcatttttttctgaacaacggtgtgctcctctccaccaaggagcttgtgatccaaaagaggtcactcagcaacagagcccatgcaaacacctaatgatgaactacaacccaagtgcccctgggagggtcacttcctcagactgaccagaggctacttttccaagcaggtgagtaacactgtcctggaaggagggggtgtgtccatgcttccactctcccctctcccagaaatcactcatcagagcaaaccgggagatccacaagaacagccacctcacaacccatgaaggtttcgttttgttttttgacacagggtctccctctgttacccaggctggagtgcagtggtgcgatctcggttcactgcaacctccatctcccagattctcctgcctcagcctcccaagtagctgggattacaggcatgcaccaccacgcctggctaatttttttgtatttttagtagagacaggttttcaccatattgtccaggctggtctcaaactcctgacctcaagggatcctcccacctcagcctcccaaagtgctgggattacaggtgtgagccaccacgcccggccatcccatgcaggtttttatattcaaagaaaaacagacacgtagttcatgcctgtaagcccagcactttgggaggccgacacaggaggatcccttaagcccaggagttcaagaccagcttaggcaaaatggggaaaccccatctctacaaaaaaaaattttttttaattaaaagaaaaagaaaaaaactgggccaggcacaatggctcatgcctgtagtcccggcactctgggcagctgaggtgggaagatcacttaagcccaggagttcaaggccgcagtgagctatgatcacaccactgtactccagcctgggtgacagagtaagaccttgtctcaaaaaaaaaaaaaaaagaaggagaagaagaagaaaagaaaagagaaaaactaggccaggcacgaaggctcactcctataatcccagcactttgggaggccaagggaggaggatcacctgaggtcaggagttcgagaccagcctgaccaacatggtaaaaccccgtctccactaaaagtacaaaatttgtagggcatggtggtgcatgcctgtaatcccagctatttgggaggctgaggttgcagtgagccaagataacaccattacactccagcctagcaacaagagtgaaactctgtctcaaaaaacaacaacaacaacaacaaaaactaggccaggcacgatggctcactcttgtaattacagcactttgggaggctgaggcagggaaatcacttgagccccggcgtttgaaatcagccttggcaacatagtgagaccccgtctctacaaaaaaatttaaaacttagccaggtgcagtggtgcacacctgtggccccagctactcaggagactgaagcaggagggtggtagttcgaggctgcagtgagctatgatcatgccattgcactccagcctggacaatggagcaaaaccctgtctcaaaaaaaaaaaaaaagggggcccagcgtggcgactcaagcttataatcccagcactttgggaggctgaggcagatggatcacttgaggggtcaggagtttgagaccatcctgaccacatggtaaaaccccatctctaccaaaaatacaaaaattagccaggcacggtgatgcgtgcctgtaatcccagctacttggtaggctgaggcaggagaatcacttgaacccgggaggcggaggttgcagtgagctgagatcacgccagcgcaatccagcttgggcgacagggcaagaccctgtctcaaaaaaaaaaaaggaaagaaaaactgcacaaagtccaaggtagagtgagaaggccagcagctatgtgtactgctgcgcctttaccttccaccacgctgctccagctggctaccaggtcaacaccagagccctctggggagagaaaacaggagggcttctacctgggctgttcccagagctaggattacctgctcctgggagccacagagaaagttccacagcaagttcctttctagcccctgccacacctgaatttgtaaaagcctcttcacaattaaaaactaaaaataggccgggcacggttggtcacgcctgtaatcccagcactttgggaggccgaggtgggcagatcacaaagtcaggagatcgaaaccatcctggctaacacgaaaaatcgcaccactgcactccagcctggacaacagagcaagactccgtctcaaaaaaaaaaaaaagaaattaaaaataaaagccctctccacaagttgcaattggcaaactatataaccacagcatcgaggaatacaaaactctggcttctgggtgatagagttgtccacatgagagtttgtccataaccagtatatttctctggttacacaatcaagttcttcaagccaccttcctcaagctcactacccaaaaccacagagagcacggagctgccgtgccttagaaaagtccatccactatactgccccatgggcaagattaaattcgaaagtagccaagctggctgggagcagtggctcatgcctgtagtcccagcacttttagaggctgagaaggacggatcactggaggtcaggagttcaagaccagcctggccaacatggcaaaaccctgtctctactaaaaatacaaaaattagccgggtgtggtggcacgtgcctgtagtcccagctactcgggaggctgaggcaggagaatcgcttgaacccgggaggcagaagctgcagtgagccgggatcgcgccacctcaatgaagcctgggcagcagagtgaaactccatctcaaaaaaaaaaaaaaaaaagaaagaaagaaagaaagaaagtggccaagccacttaaattaccagacagctttttgagaaaaatccaagtttgaatcaccccaaaatataatccagccagccaagttgctctggatggcttggaaaagttcttctaggaagcccctcctggctggtcaacacactgccctacacagctgggctccgagccagaggagtttaacagtccacagttaccttcaccctaacatgaggaagatccagcttagagaggggatgtaaccaataccctaaagtaaaaatagcagtgtgacagcatgaggtggacacacaggcggaccttctggactgaaaagcaagcgagggcagcatcagagagaaggcggagctcctggttcctaaagcacagaagacagtggtgaccaggtaccaagtccatcgtagttatatgactcacgagctctcccccagctgtttctaggaaagcctgccttcctgcaggacaagtcagaatcgctcagggaaaaagacccagggccagaattctaccaggaagagaggctctggctggtcatgggccagcagctgctgtcgctgccactgtctcctcctcacctgcaggggcgccttagcctcatcttggggagtctttttgacaaggtgcgaacttgctctttcaaaaaaaaatgaaatcctcattccatgaaggggaaaactgcgacaccgggacagggaggaaattgcccaaagacatgggaagaagcacggaaggggtgggcaccgggagagtggtggaaacgaaacagggggaagaaattctcggcttagctaatggagctgaacaagttcggggcaggaagaaagccacattccttcctagttagtctccctcctcccccgcccgcggcacccccccacccccaccatcaacagtatacacaaacacacacacacgcagggagcagggctctctgagcccgagactagacccacccccactccctttagggcaatgaagcccccaatttccagaaaaggagttacaaggttcctaaaccacttcccctcgggacctgaccactggtcatctgcaacttctgacccagcacagacggggggagggggggccatgacacaaacagaaatgaaaaaggcaggtttctgaccacggccccagatgcgccccaaagtcaggcccaagagaacatacacagcagcctcccctccccaccaccagccaggtggcagaaccgaaacgcctcaaacttcccccagatgggcccaaatcggcctctgagaagttccagagtcagcggccagatgtggtagccagagcttcctcctgggtggcagggatcccctacatgtgccctgaggataacatcacagccgcccccaacacttccactctccaaggaacctctctccggagagagagggtcacctgggggtaaggggagcagaaagctgggacaagctgtcagtttctgcccaaactccccgtcccaagaaccaaagtggcccaacctgagtggcttcatcggaacgcgtcaaagccagcccccagctgcaaagccttccacccagacagaacagacccccacaagtgcctcgctgaccaccccctgccgggcacccagacgatcgctgcttcccaggaggacagacacagtcacccccaccaacggcgctgccccggccccagatggaaaagcccccagcttccccctatcacggtgccgggaccgtgcggcccaccgcctcctcgccccgccgccaggtgcgcaaactggaccctgcccaggtgcccagcaggccagaaaggccccggacgccgccaggtgccgacaccgacgccccccgggcccggcgcgcgagtctgggcccctcagcagccccgggccacccgcctgtattgcctcctagtgctgagaaggaacgcggttctcagcgctccaggccggactggcgcccactccgcgccccgccggcccagggacccgcgagcagcaccacagacctagcgtctccgagcccggacgcctcagtgaggggagcgcgaggccggcccgcgtccggacgttccccactggcgcgccgggcgccatgccactcacctgtctggcgcggtagctctcgaaggccctcagggcactgtcggtgagcttcacgtggaacaccgacaccttgctgccgtcgctaacccgcccgcacgacagcccgtagctcctatcctccttcagcgccgccatcttgcgaccatctctcccccgcgcccccttcccggctccagcgccgccacgccggccacgccccgccccgccgcccgctgacgcgctgcattattcatgagacgcggctggccacgccccccgagtccgaccaaaccaacagtcgccgccacaccggcaggcagcgcactacattattcaggagacgcgcctggccacgccccatgagggccccacaaggcccacagtcaacgccccaagttgttgcatattcataaggcacttatggccccgcctcttcaggccctaggggtggccacttccgtgaacgaactccgcctcaacacgcgcacccctccaggccccgcctccatagtattatacataaccctgactcagccagccaggcgcgtcaaagccccgcccctacagccgctgacgtgatgcattatttatgagatctctacagtcttccgtctttggcttctgtggaaagccgcagagagggcgtggaggggcggagccggctcgaaacacgtgggtgggtaggccccgccgcgggccgggagggtgggcgtggctatgtaaacggagcgcgcgcgttggacgctgggttggacacataaggcatcccttaggcggggtggatgggacttccacccagggaaggtgctggaccggtaggtggaagaggagctggtaaactttttcttatgagatgagtacttttaataggataaaatcctacatccccacagtccctgagcgatggtgcagtccagcttcattttcctattttaatttttttttgaggggtcttgctgtgttgcccaggctggagtgcaatggcgccatcatggctcactgcaccctcgacctcctgaactcaaactgatcctccttgtctgggtctgctgaaatgctaggattacaggagtgagccaccaagcccagacttccattttcttttcttttctttttttttttttttgagacggagtcttgctcatcagcccagactggagaacagtggcgctatctcggctcaatgcaaccatcgtctcctgaattcaagcgattctcctgtctcagcctctcgagtagctgggattacaggcgcccgccatcatgcccagctaatttttgtattttagtagagatggggtttcaccatgttgaccaggctggtcttgaactcctgacctcaggtgatccgcgcgcctcgccctcccaaagtgctaggattacaggcgtgagccacctcccccagtttttgtttgtttgtttgtttttagacagagtttcgatttccttgcccaggctggagtgcagtggtgtgatctcggctcactgcaaccaccgcctcctggattcaagcaattctcctgcctcagcctcccgagtagtagctgggactgcaggcgcccatcacaacgcccagctaattttttgtatttttagtagagacgggatttcaccatgttagtcaggctggtctggaactcctgacctcaagtgatgcacccacctcggcctcccaaagtgctgggattacaagcatgagccactgtgcccggccagccttccattttctaaaaagcaacttcattgagtcacattttacatataaaatatattcccaatgctgtgtagctgtcaccactatctaatttccgagatttttttttctttttctttgagacagagtttcactcttgttgcccaacctggagtgcaacggtgccatctcagctcgttgcaacctccgcctcccaggttcaagcgattctcctgcctcagcctcccgagtagctgggattacagatgcccaccaccacgcccagctaatttttgtattttcagtagagacggggtttcaccatattgatcaggtctctaactcccaacctcaggtgatccgcctgcctagggctaccaaagtgctgggactacaggcgtgagccactgcgcctggccaagggaggagctggcttggagggccaaccagctcgctctgtgatcttgtgaaaggcacctcctgcttctgagcctctgtggattcacttcggaaacaggaaacagcaataagagcagtactcaggacctagcaaggtgtctcacacctgaaatcccagcattttgggatgccatgacgggaggatcgcttgcacccaagggcttgagaccagcctgggtaacagggctaagccccctctctacaaaaaaatttaaaaaattaaaaaaattagccgggcatggtggagcacccctgtggtcccagctactccggaggctgacatgggaggctctctcaagcccatgggaggttgaggctgtagtgaactatgttcgcaccactatattccagcactccagcctgagtgacagagtaagaccctgtctccaaaaaaaaaaaaaaaaaaaaaaaaaaaaagccaggcccccagtggctcacgcctgtaatcccagcacttttgaaggccgagggggctggatcatgaggtcaggagttcgagaccaccacgaccaacatggtgaaaccccgtctctgctaaaaacactaaaattagccaggcatggtggcacacgcctgtaatcccagctactcagaaggctgaggcaggagaatagcttggacccaggaagcagagcttgcagtgagccgagatcgtgccactgcactccagcctgggtgacagagcaagactcggtcccaaaaaaaaaaagtatttctccacgtctactttacatttgattccccagtggatctcaatgagaccccaggaaaaataaggcagaacttatcagacgttggcatgctctgcagaagtttcttttttttttttttttttgagacggagtctcactctgtcgcccaggctggagtgcagtggcacaatctcgggttcactgcagcctccgcctcctgggtccaagcgattctcctgcctcagccgcccgagtagctcgggttacaggcacgtgccaccacgcctggctaattttttgtatatttagtagacggggtttcaccgtgttagccaggatggtctcgatctcctgacctcatgatccgatgatccgcctgcctcagcctcccaaagtgctgggattacaggcgtgagccaccatgcctggcctttttttttttttttttttttggagacaagttctcactctgtcacccaggctggagtgcagtggcatgatctcggctcactgcagcctccaactcctgggctcaacccatcctcccacctcagcctcccaagtagctgaaattacaggcatgctccaccatactgggccaatcttttgtattttttgaagagatgagatttttccatgttgcccaggctggtctctaactcctgggttcaaaagatcctgtcgcctagcctcccaaagtgctaggaagtgctaggattataggccataagccactgcacctggccgtctgcagacatttttgtttctttgttttgagacggagttttgctcttgttgcccaggctggagtgcagtggcacgatctcggctcactgcaacctctgcctcctggttcaagtgattctcctgcctcagcctcctgagtagctgggattacaggcacacgccaccacacccagctaattttgtatttttagtagagacgggatttcaccatgtaggtctcgaactcctgacctcaagtgatccacccgcctcggcctcccaaagtggtgggattacaggcgtgagccaccgtgtccggctttgtctgcagaaatttttaagaactaggttacccatggccaggcatggtggctcacgcctgtaatctcagcactttgggaggccgaggcgggtggatcacttgaggtcaggagatcgaaaccatcctggctaacacagtgaaaccccgtctctactaaaaatacaaaaaaattagccaggcattgtggcaggcgcctgtaggcccagctactccggaggctgaggcaggagaatggcgtgaacctgggaggcggagtttgcagtgagccgagatcgcgccactgcactccagcctgggtgacacagcgagactccatctcaaaaaaaaaaaaaaaggaactaggtcacccacaatattgcaagtgagttgatcaccctggggtgccccccggacacatagtccacctggtgagctctctgatggaagcagtgaccccaccctgccccttaccccgtgtgtggtcttggacacatcttgccatctctgttcctcagtttgctcatccagaaaacagggagtgtaacagcatctacctgattcttctgtgacaatgacatgagacaaggacatgtgtagctcgccctgttcaagtgttccagaattgtgagctcgcgtacacatacaaaattccttccgcagtgctcacttccaattcacagcccatggcaagtcgggtaaggccctcctgagtcactgctcaaggccaggtatatgggaggtgttagtaaatgctttggtatgaaagacaaagccatccccgtcgttctccaaaggtaccacacatggtccagctggcataccttgcacagctatgccatccacaagggatacccttcaccacccattaaaggcatcccatgccttcaacacaactgcagcgtcacacgtgctggatgctccagctcaccacccacaaccagctcagacctttgaggatgaagtggccgagtgaataaccacattcaatttcacactcctagtctggccattcggggcctctctcctccccgtccccgcaccatgtcataacttgcatgttctaggcagctccgggcctatttcttttttctttttttgagatggagtcttgctctgtcacccaggttggagtgcagtggcgcgatctcagctcactgcaagctccacctcctgggttcacgccattctcctgcctcagcttcccatgtagctaggactacaggcgtgtgccaccacgcccggctaatttttttgtatttttagtagagacaccacgttggccagaatggtctcaatctcctgacctcgtgatctgcccgccttggcctcccaaagtgctgggattacaggcttgagccaccgcgcctggccagcggggctatttcaactccagacattggcaccggcagtttgcttggccaggaaggacatttccttcctttaataaagcttttttaaaagtttatcaaacaagcagccaggagtagtggctcatacctataatcccagcacttagggaggcagaggtgggggaatgacttgaagtcaggagttcaagaccagcctggtcagcatggtgaaaccctgtctctaataaaaatacaaaaattagccgggtgtggtggcacgtgcctgcagtcccagctactccggaggctgaggtaggagaattacttgaacccaggaggcagaggttgcagtgagccgagatcgccccactgcactgcagcctgggcgacagagtgaggctccgtctcaaaaaaaaaaaaagtgtatcaaacaagtgagtgaaatattaactatcagtctcacatttagccaggtctaggctgcaattcaagactaaaatattggctgagagcagtggcacgtgcctgtagcccctgctacttgggaggctgcagtgggagaatcacttgagtgcagtggggtgggtcaatgctgcagagagctgcaatggtgccactgtactccagcctgggtgacacagcaagaccgtgtctctaagaaaaaaacaagactaaaatatcttaggagctcctggattgaagaaattctgtatcttaagatttgtatgctggccaggtgtggtggctcacgcctgtaatcacagcactttggaaggccgaggcaggcggattacgaggccaggagttcgagaccagcctggccaacaaggtgaaaccccacctctaccaaaaatacaaaaaaattggctggacgtagtggcactcacctgtaatcccagctactttggaggctgaggcaggagaattgctgaacccaggaggcagaggttgcagtgagccgagatcaggccactgcattccagcctgggcaacagagcaatactccgtctcggggggaaaaaaaaggatttgtgtgctacatgaacaggaaacaagttgactttgcattacgaaaagtcaagaggttctatatatatattttttggcgatgagtttcactcttgttgcccaggctggactgcgatggcgcgattttaggtcactgcaacctccgcctcctgggttcaagcctattcttctgcttcagcctcctgagcagctgggattacaggcttatgccaccatacccggctgatttttgcatttttagtagagatggggtttcaccatgttggccagactgttctcgaactcctgacctcaggtgatccacccaccttggcctcccaaagtgccgggattacaggcttgctatagggattctgaggcacaagaatcccttgcacccgggaggtggagtttgcagtgagctgagatggtgacactgcactccgacctgggtagcagagagagagaaaaagaaagttaatcaccaatgtggtgaaactccgtctctactaaaaatacaaaattagctgggcgtggtggcacgcacctgtaatcccagctactcaggaggatgaggcaggtgaatcccttaaattctggaggcggaggttgcagtgagccaagatgcaccactgcactcctgcctggatgacagagcaagactccatctcaaaaaaaaaaaggccaggcgaggtggctcatgtctgtaatcccagcactttgggaggccgaggcgggtggatcatgaggtcaggagttcaagatcagcgtggccaacatggtgaaaccccgtctctactaaaaatacaaaaattatctgggcatggtggcgtgtgcctgtaatctcagctactcgggagacgaggcaggagaatcgcttgaaccgtgatctgggaggcagaggtagcagtgaacaagatcatgccactgcactccaacctgggttacagagcgagactgtctcaaaaaaaaaaaaaaaaaaattagtcaagcttggttgcgtgcccctgtaatcccaagctacttgagaggctgaggtgggagaactgcttgaaccctggaggcggaggctgcagtaagctaagattgggccactgcactccagcctgggtgacagagcaagaccccatctcgaaaataaataaataataaaaaaaattggccaggtgtggtggcgtgcacctgtaatcccagctacttgggaagctgaggcaggagaatcgcttgaacccgggaggcagaggtcagaggttgcagtgagctgagatcatgccactgcactccagcctgggtgacagagctggcatgcaaaaaaaaaaaaaaaaaattagctgggtgtggtggcacatgcctgtaatcccagctacttgggaggttgaggcaggagaattgcctgaacctggggctaaccactggaaagagagcacagcctcaagccacactcagcctcaagtcatccaggtgacccagagaacaagggcctggaagaagcgggtgagtgggtgaggtggaggtgtagattggagtcctaggcctttgggaggccctccaacctcccttctgcaccaacttctcctgggtggctgtggcaggcagctttccctcctgggctgtaaggggatagatgcaggtgaggtgactgtagtggtctattttcaaggatgcccttattcttgggggcaagatggaacagcaggaagaaagggtgtgggtgctgggctgacagaggccccgatgctggctccgcccatcctggctgcactggtgagcggcatcataggagaagctcccagagtccagagttgggagagccagatgggatcagggaacctcccagcatcaaccctggcccttcctcatggcccctaaagccctgcagggtatggctctgcaggctacccagcctcatccatctggaatgcaccaggctagacctggccccagggtctttgtactgggcgtgctgttgcccagacctggggctgtcggcttcctgcatgggcagacccttgccatcgctgaaatatcagcgcacacatcccctgggagaggtcttcctgggcctccagctgtgccttctcacaggctgcatccagacattcacatcctctcccctggaccccatctgtctcttgttttgagatgaagtctccctgtgttgcccaggctgcagtgtagtcccatgatctcggttcactgcaacctctgcctcccgagtagctgggattacaggcatgtgccactacacccagctaatttttgtattttaagtagagctggggtttcactatgttgggcaggctggtctggaactcctgagctcaagtgatccacccacctcggcctcccaaagtgctgggattacaggtgggaaccactgtgcctggtgcactttttttttaaacatagatggaatctcactgtgttgaccaggctgggctcaagcgaccctcccaccctggcttccaaagagctgaaattacaggccatgacactacaccccacctctttattaaaaaaaaaaaaaggccgggcgcggtggctcacgcctgtaatcccagcactttgggaggccaaggcaggtggatcacgaggtcaggagatccagaccatcctggctaacacggtgaaaccccgtctctaccaaaaatacaaaaaattagccaggcgtggtggcaggcgcctgtagtctcagctactcgggaggctgaggcaggagaatggcatgaacccgggaggcggagcttgcagtgagccaagatcacgccactgcactccagccggggccacagagcaagactctgtctcaaaaaaaaaaaaaaaaaaaagagccgggcacggtgactcacacctgtaatcccagcactttgggaggcctaggcaggcagatcacaaggtcaagagatcaagaccatcctgaccaacatggtgaaaccctgtctctactaaaaatacaaaaattagctgcgcatggtggcgtgcgcctgtagtcccagctactcgggaggctgagacagaagaattgcttgaacccgggaagtggaggttgcagtgagcagagatcgtgccactgtacttcagcctggtgacagagtgagactccgtctcaaaaataaataaataaataaataaataataaaaagagagacctcactctggtgaggtcttccagcctaggctggagtgcagtggtgcaatcatagctcactaaagcctcaaattcctgtgctcaagtcatcctcctaccatctgtctcttttgaattcagtacatccactaggtaaagcaatgatgccacagaacccatgcagcagcctcaaggtagggcccactggggtcctggatttcaggtgagtaaacagtgaacgctggggtaacgagtggagctgggcagtaacacccccagagtccagctgagtcagacctctcaacccacttgcccctgctacatcaccccacttctctatgcctcagtttctcctctgtaaagtgagtatgttgtgcccggagaggagacccccagctccagctggctcaaccacatccaccatgctgtgtgactccagatgcatcacaggctgtctctggcccagccccagacagcgggagaagaaagctcaggagtccgtggaaactgcagggtgggatgctttatttcactgtggcggggagggaacctggacagggggcggcaggcggggtggggggctggcactcaggcggggactaggcaggggaagggctgcccccaggcctgttgaggagaaactgaggccagccctggcggagacctagcccagcggggtaaggagggtgggggaaaactgggtctgaaggaatgagggccccctccctctgggctttcctcctagagggcctcagtccctcctgctggctgggctgcacgacccccaatccttgctcccctaacccggaggagggggccagaccagggagggcagtggacagggagcctgggggagttggggagcgcagggcagggtccatggtgtgcagagggggtggcagccacctaggtggtcagttcctggcagcgatgaccacagagagtgccacaccccccaaggcaacagcagtcgccccaaacagccacttccatgggatggactgtggataaaaaggaggggagagaagggtggagggaggtcaagactggcctctggggcctcagctgccagcacagcccaaacagacctcccaacaaatcattgcctgactatgtatttcccacttcctggcaaactcctactcatgcagcaaaacccaaatcaaatggcccctcctccaggacaccgcccctcgtgccctggaagaggctccacagtccacccccagccctccagcttgagttccaccttcgactccactcatgatcacacagggctgggctctctccacgtcccctgcatcgcccaggacggcccagtctccgaggacatccatgtatgcaaaataaaatccctctgctaggcgtgccctgcacacagcccctgcccattctgtgccccagctcacccaggcacccttgccagggcacttagcaggcagccggctggggttgcccagcattttccggtacaaggcggtctccgtgctccgctgcgccgcatgcttcttcaccagctttgagagctctgcgtggatcgtctgcagaaggcaggggaagctgagaacacgcagcggccaacctgtcatcactggcgctctgccttactgggaccctaggctgtttgggtggtgggactgttgggacacaggggtcccatctgcccctttctgggcttagcaaagtcagggctgctgaccccatccctcctagggagccaattgatggcgcagagcacaaggtagccaggagacaaaaggttctggaaggaaggccaaggacactggcatggagcaggctggcagtgccctcagctgctggaggagtgagagcccagactgcctgtgtggccgtcatgagggtcttcacaagctgaccaggacccttcaggtacctactccgtgccactgcccaggtgggaacacaacagagagccacagcaagaaagacctggggcagaccgcaggagggacttcccagccgagcaagtcccagggcacccctgtcctgctcaccttgttggaaggttccagcttcagggctgccctcaggatggggatggcctcactgtactccccctgctgggccagcacctgtaaggggaagggggtggcatcactctggacccatacctgggcctgtccttcaagaaatccagcccaggaggttgcagtgagccaagatggtgtcactgcactccagcttgagcaacagagcaagactccatctcaaaaaataaaataaaataaaaacagcctggccaacatggagaaaccccgtctctaccaaaaaatacaaaaattagccaggcgtggtggcatgcacctgtagtcctagctactcaggaggctgaggtgggaggattgcttgaaccagggggcagaagttgcagtgagccgagatcacaccactgcaccccagtctgggtgacagagtgcaaccctgtcttaaaaaaagaaaaaaaaaaaagggtcgggcgcagtggctcatgcctgtaatcccagcactttgggaggccgaggcgggcggatcacaaggtcaggagatcaagaccatcctggctaagacggtgaaaccctgtatctactaaaaatacaaaaaaaattagctgggcgaggtggcgggcgcctgatagtcccagctactcgggaggctgaggcaggagaatggcgtgaacccgggaggcggagcttgcagtgagccgagatcgtgccactgcactccagcctgggcgacagagtgagactccatctcaaaaaaaaaaaaaaaggctgggcgcggtggctcacacctgtaatcccagcactttgggaggtcaaggcaggcggatcaagaggtcaggacgtcaagaccatcctggctaacatggtgaaactccgtctctactaaaaaatacaaaaaaattagccgggcatggtggcgggcgcctgtagtcccagctactcgggaggctgaggcaggagaatggcgtgaacccaggaggcagcacttgcagtgagccgagatcacgccactgcagtccagcctgggcgacagagcgagactccgtctcaaaaacaaacaaacaaacaaaaaaaacagccaggctcctggctactcatacaagtgccaaatggagctctggcaacatccctgggttccagccactcccaaactgctctcctagccctcaaactccatcagtgcacacttagcttggcattggtccccgcaacatgctcctccttcctgtctcagctgcagatctaggcacccacctcgctgcctcctccctcaccacctccactggcgagaggccgaatggatgcttccagaggttgttgttttttttttctctttcctttagagacagggtcttgatcggtcacccaggctggagtgcaatggcatgatcatagctcactgcagcctcaaactcctaggctcacacaatcctccagcctcagcctcccgaggagctgggactacaggcgtgtactaccatgtccaacgaattatttatttatgtatttatttataaaattattattactattgttattattattattttgagatggagtctcactctcgcccaggctggagtgcagtggcacgatcttggctcaatgcaagctctgcctcccgggttcacgccattctcctgcctcagcctcccgagtaactgggattacaggcacctaccaccaccggctaatttttgtatttttagtagagacagggttttaccatgttggccaggctggtctcaaactcctgacctcaagtgatccacctgcctcagcctcccaaagtgctggtattacaggcatgagccaccgctccaggcctacttatttatttattttattttagagacagggccatgttccccaggatggtttcgaactcctgggctcaaccaatccacctgcctcggtctcccaaagtgctgggattataggcgtgagccaccacgcccagcccttaattattttttaaatttttgtagcaatggggtctcactatgctgccaagactggtcttgaattcctgggctcaaatgatcctcctaccttggcctcctgaagtgctgagattacaggcgtgaggcaccacacctggccctgatgtttccaaagctttggccatagtgaatgattcaggaccaggcacatgacccaaatgagtcaatgagatccagcctgcactatgctggtgctgatgggagatgggttgctaaggggagaagatggagctgggcgaagtggctcacgcctataatcccagcactttgggaggtcaaggcaggtggatcacttgaggtcaggagttcaagaccagcctggccaacatggtgaaaccccgtctatactaaaaatacaaaaaaaggctggatgtgctcgcttgaacccaggaggcagaggttgcagtgagccaagatcgtgccactgcactccagcctgggtgacagagcaagactctgtctcaaaaaaaaaaaaaaaaggagggggtagaagatggaaatctgtaactttccaggggggaggggggagcatcatggtcaccctgagagaggagccggcccaggagggaaggtcagagcagagaaacagcatccccacaatattgtgagtgcctggatccagctatgcctgaagccagctaatccaaacttggcagttccatgagctatcgatccctcctttctgcttgaacctgtttgagtgggtttctatcaccttcaaccagcaggtccaaacttgtatgaagctacacaagcagccactcctgctgcccccaggaggatactacccccaggttgagaacaaagccttcaaaaacaggaactgcatcttctccctcttcatatttctctgcagaactccgcacacagtatgtccttaataaatcccagctggagggagccccacctcaggcttttcagaaacacagcaggtgagccagtatctgtgcctcagtttccttcgttaactgctaaaaggtcctgaaagccccacctaggggtgaggctgtgaggatgaacagaaaagggggtgagaatgaaggtcaagtctgtgcaagccagattcacccctatgttctgccagaacttttttttctgttctcgtgttttgtttttgacacagggtcttgctctgctgccaaggctggagtgcagtggtgtgatcaaggctcactgcagccttgaccttcggggctcaagccatcctcagcctcctgagcaactgggacgacaggcccgcgcccccacacccagctaatttttgtatattttgggtagagaagggggtctccctatgttgcctgggctcgtcgcaaatgtctgggctcatgcgatcctcctgccttggcctcctgtaatcccaagtgctgggattacaggaatgagccattgtgcctggcctctgccaggacttttactgagcacctactatgtacctggccctgtttgcaaggctggagatccggcagtgagcaagacagaccaaatctccacctttgagtaaggtagatggacaagaggcatgtcacctccacgtgctgcctgtcaggaacatctcagacagtcggcaatgcctacgcaaaggccctgaggtggagagagcctggctagacagcagaaagggagaatgccacgtgggatggagagaagcagaaagtgaggtgggagaagtgatagcaggagggggaagaccagacaactcaaggccccaagggctgtgactaggattccactttactctgaggaaaactgggacccatggaggttctatgggaggaggtttcaacactgggccaagccgggcacggtggctcaggcctgtaatctcagcacatggggagactgaggcgggcagatcacttgaggtcaggagttcgagaccagcctggccaatatggctaaccacatctctactaaaaatacaaaaattaactgggtgtggtggctcgcacctgtagtcccagctacttgggaggttgaggcaggacaatcgcttgaacccaggaggaggaggttgcggtggtgagctgagatcacaccactgcactccagcctgggtgacagagtgagactctgtctcaagaaacaaacaaacaaacaaacaaaaaacactgggccaaaggttggggacccaagactcgaggatcaaattctggcctcagccaatgaattgttgtgaccaggccacactcctgcacccgtctgggcctcagtttctccacctgcaccccacagagctcagctggcttatatacctatgcctttctcaaatgcagggttggggaccaccccgtataccccaggctgagtgacccggcctggcaccccggtgtggcctaccttgcccttgcggaagagagccttgatgttgtctggctggtgctccagcacaaggctgcaggagcgcagggctgcgcggtagtggtcgagcttcagctgcgaggccgccaggttgttcagacacttcaccttcaactgcaggagctgtgcctcctcctcgaacgtcatgtccactattgggagacagtgcccgccacggcagccgtcaccatgccaccagacaccccggcacccacccctctgcggaggctgcctctctggcctcagtttccccaattttaaccccggaccaagggccacgctttcctggggctctcctgaggaagctacaagatggagacttaagcaagcgagggcctagcctgtggtacatgtgaactggccctgtctatggtcaccccatccccatatccacttgcattctacaacactccactggtctgggatataccacgagtctgtaacaggccctagcttaggggcagttggggatctacccatattctgggctattctagaatattctgagtctgaggctctctggggctggaagtttctggcacggagtggacacctttgcaggggagatggtggagatctgacccaggcggtcacctttggcgctggaggtgatagccttgatggcgaggtcgtaggagttggcggccaggacgaagtccgcccgctggtagtgggcgttgccgcactcccgcttccggttggccagggccacgcgctcctgccccgtgagcatctccaggtcaggcccgtccacagccgtcttcagggtcacctccaggcacagggccgcgtgcggggggatgtatgggctcctgctagttgggtgggagcaggcaggggcagcactcagacctggtgacccctaaacccgctgggctggctaggaaggagtgagcttggctcaagcccccgatctgtctcccctctgccctccatcattccctcctcagtaaagtgcaggggaagtgacttgccgccttggagctgcgggacttgacgaacgagttcccctccctaagcctcggttttcctcctttttattaagagacaggttctcactctgttgcccgggctggagtgcagtggtgcaatcttggctcactgcagcctcaaaaacgtgggctcaagtgatcctcctgcctgagcctcctcagtagctgggactacaggtgtgcaccacacccagcttttttttttttttttttttttttttgagacagtcttgctctcttgcccaggctggagtgcagtggtgcaatctcggttcactgcaagctccgcctcccgggttcacgccattttcctgcctcaacctccagagtagctgggactacaggcacccaccaccacgcctggctaattttttgtatttttagtagagacggggtttcaccgtgctagccaggatggccttgatctcctgacctcatgatccacccgccttggcctcccaaagtgctgggattacaggcgtaagccaccacgcccggcccacacccagctaatttttaaatttttttgtatagagatgcggtctatattgcttaggctggtctggaactccaggtctcaagcaatcctcctacctcaacctcccaaagtgctgggatttcaggtgtgagccacctcacccagcctcagtttcttgtctataaaatgggcaagtagatggggtgagccgaggggtacacccactccacccatccccctcctgagacctgcagagacctaagggtggctgactctcacctgccttgggggccgtagcagtacttggagtcagcagtgaccatggccgtctcccccacgtccatgagtgggacactgagatccagggcctggggtgtgtggggatagccagctgtcaggcagactcagacccagcaaggcacgcccctcgcccctgccctgtcccgccccagcccgcacctggatgacgtcacagtcacccagagtgaacaccagctccggctcctcctgcacccgtgtgccattctccagcgacgtctgcagatgtacggtgaccacctggcccttgaccgggcggctcgaacctggcggccctgggaccagcgtcttcttcctcaacagcccgttccctgccagggtccagggacatgcagcctgtcacctggcagctcaaacaggcacccgctcccctgagcccccactcctaccctcagctctgcccactagctgtccagagggggctggcccaacactggggcacaaaccaaacttccaatggccactctgccaccagagtggggaaccccacgtgcaggacactgggcaggatgggacagacttcagggtgacagtgctggtgctagagaccagctcagtgaacaatggttggtctggtttttttgtttttttgttttttttttttaagaaaactgagacttgccgagtttccatctatttgagaggccaatgtgggagaatcacaagttcagcccagcgtctgggcaaaatggcaagaacccagtctccccaccctcctcaaaaagaaagaaaaccaaagctcagagaggacaaacagccctcaggctgaaatccttgccctgagatgtttgggcctcggtttacccagccatgaaatgaggtgctcatgggacctttggttagcagagcccctgtgacacagtgtccccaccacagcaccaagtgggatgaatttataagttaagcaaaggacacacatggtggctcatgcctgtaatcccagaactttgggaggctgaaatgagaggactgtttaaacccaggagtttgagaccagcctgggcaacatagtgagaccccatctctacaaaaaataaaaaatgaccaggcatggtggctcacacctgtaaccccagcactttggaaggctgaggcaggaggatcacttgaggttaggagtttgagaccagcctggtcaacatggtgagaccctgtctccactaaaaatacaaaaattaggggccaggtgtgctggctcacacctgtaatctcagcactttaggaggccaaggcaggtggatcacctgaggtcaggagttcgagaccagcctggccaatgtggtgaaaccctgtctctactaaaaatacaaaaatcagccaggcatagaggtgggcacctgtagtcccagctactcaggaggctgaggcagaagaatcgcttgaacctgggaggcggaggttgcagtgaactgagatcgcaccactgcattccaacctgggtgacagagtcagactctgtctcaaaaaaaaaaaaaaaagtagtaagatttttatcagtagtggtggtgatatttagtaatatttctgttccatcagtgtcaatatgattggaaactattgctacagtattgttattacaattgatagtggtaatgatatcttattatttgcatgggcaccagcattatttggtatattagatatcagtactatactagtagcaagacgtcttccacagaaaactaacatttctcttgttttcagttgctgtgatggggtatgttggggggaacatgtgggggctcatgtagttttcttcttgtaggattgctctgagcatttacaatactatcactactgtgaaccaaccagaaggctgaacaaaataacattcctctgatccacttgaccccagaacacattttttgttttggaagttggggtctcgctgtgttgcccaggctggcgtgcactcaggacacatttttcagagcccaagcatgtgtcagacaaatgccaaaaaaagatgcattgatggggttaggagctgccagcgcctggcgtgctggctgtgtggctctgggcaggtgactcagcctctctgagccactgttagcagatctgggaaacggggacacagcacattgtgcatgtgtgtgagtcagtggatagagtacatcaatgtgaagcatctccagtagttgcctctggctggtgatcacggtggtgaccacgtgacttccaaccctcacagcacagatggggaaatgaggctcaggggacgagagggccagggccaagggcaccctgatccacctttgctccttacccagaatgtccagccactcttctggggccggggctggggcgggctcgggctccatggcagcaaggaactctcgggccagggccccaggctgctcagcctcctccgccgggggttgtcccatgtcctccagcggtggcagctcactcaggtcatcctcttcctcctcttcctcctcctcttcctcctcaccctctgcatcctcaaccccatccagtacctcgaagtcctcgagcggtgggaccccggcgggcagtggggcagagggctcagagggttcagcacacgatgccatgctgctggggggacaggaattggccctggaagtggggggcagagatgtgggtcagaatcctacacagcccctcaaagtctccactgtactgattccccacactgccgatcactttctgtgtaactcaagggctccaggcctcagtttcctcatctatacagtgggtgtaacaacaaccccagcttgttgggagaaattaacccatgcatcaagcccttggcatcaggctcaaatagtgttagccattattagagctaattattatttaatgtttacaaatactccaggaagtagggaagattcccctcaacattttgcagaacaggaaacaggccagaggggcaaaggcatttgcccaaggtcacagagaaagccaaaggccaaaggaggatttgaacctggggcttcaggccctgtggctttgcctgattataagctgagcgaagggtgctgggatttttgtggagaggacagcctccgaggccttagggaagccatttttagagcctctaaggccactgggggaaattgaatcttttaccagggcctcccacctccagcctcttctccaaaggggagaccctccccaaaagcaccaactgtaatcacccagaaaccccaagcgttttttccttccacactctgaatctaacactatcccccacaaccccaacatcagggaccctggcccaaatccttccccaggagaccatcctcctctcatcaggcctcggtcccaccccctcaaagcagcctcctttccaggagtggtcgaggtcccaccacattctacagcctcttccttgccccagacctcctgaaccaataaccaacccctccgtcccccaggccccaagctcagaagagtgtggcacagccatcaaaccagcccgccgcatcccctccctaaccctcacctgcctgctcctcccgggctcggagccccactttgagagaccctcccagcccccacccccataattccccgcgcccgcacaattcggcctcccctcccaccccccaccccaaccaccaccgcccccagcacgggccagctccccccacagccgctccgtctcgccgtaaacactccagtgtccccagacgcccccccctttccgatcccataacaccccacgctctcctgacgccccacagccccggccgggccctcagtcaagccgcgacccaggcccccaacgacccacgcctgtctgacgccaccagtctggggcacccgacccccgcacgcctcgggcgcccctggccctgcacgcctccatcgggacccccccactggatcccctttgcccccagtgacccccatccctggccacccccgcccggccgcgccccctcgggcacccccgacccccgtgcccccccggctcgccacccccgcggcccctcgccccgcccatcggccgcagcccccggcgcgctagcccccggaccagcctaggccagggcagcggcccggccggcacggcgcccccagcaccccaggacacttgcctctggctccgggacccccacttggggtcctgcgcccccctccccgcccccagccgcggccgccgcgcctcgggaaccaggttcggccgcttggccccgcccctgccgtgcccattggccgccgctgccgcgactgccgcacccgttggctcatgcagacgtccgtcccgggcgttggcacctcccccttcctgcttggccccgcggggcgttcttaaagggaccgaagcctcccggctgctggggctggggcgggggctggggcgggggctggggcgggggctggggcgggggcgggggaccctgggctggaccccaacacgggtcagtatcgcgcagcctgtgcgactcctgcctctcctctgagcttcatcctgaccatctgcgaaatggggataaacacccccatctatgcactctcaccttgggggctgctgggggcacagtccactctaaatgttatttccttaaagagttcaagcttgacgggcagggcagctctggggttgctgaatgacccatcctgaagccttagttacagaagtgaacctgagggcctgaggaggagtgacgtgcccaaaggcatacagaaacctccctcccatcccccacacagtttaatgtctagaaggttgcctggtgcatactggaggcgctcgattactgctgcgcaggcgactgagccagcagggccactgggaggagttcctcctctatgcactgtctgctggagggtgataaggtccccatggctcgggaagaaggtggcatccttgattagctaagtttttgtggatcttgttttgaaaccgggacacttctccctccttcactcagttttatttccttcctagcagttactccttccagaattatcttgtcattattttgcttgtggttggagggaccatccctcactctgcttcatcctggcagagatttttacctgatttgtacccagcacctccttgaaccatgcctggcatctatagaagctcaataaatgggtaggtggatggatggatggatggatggatggatggatggatggatgagtcagacaccagcttttggaggtagctatcatggaggtggtaactggctttttggagatcacttctaaggttggagttcccaggttacctcctacaggaagccctcccaacctccccaaggcaagaccaggtgccccctttagctgtcttggcacaatgaagttgatgaacgtccacttcataactagtttacttgggttttttgtttgtttgtttgtttttgttttttgagaagaagtttcactcttgttgcccaagctggagtgcaatggcgcaatctcagctcaccgcaaccgctgcctcccaggttcaagcgattctcctgcctcagccttccaagtagctgggagtagaggcatgcaccaccatgcctggctaactttgtatttttagtagacacgggatttcttcatgttggtcaggctggtctcaaactcccgacctcacgtgatccgcccacctcgatgtaccaaagattacaggcatgagccatcgtgcctggccttttttttttttttctttctcttttttttttgagacagagtctctctctgtcgccaggctggagtgcagtggcgcgatctcggctcactgcaacatccacctcctaagttccaacgattctcctgcttcagcctcctgagtagctgggactacaggcacccgccaccatgcccagctaatttgtatatttttagtagagacagggtttcaccatgttggccaggatggtctggaactcctgacctcatgatctgcctgcctcggcttcccaaactagtttacttatatctctgcctttttttttttgagatagggtcttactttgaaacccaggctggagtgcagtggcacgatctcagatcactgcaaccatgtctatctcctgggctcacgcaatcctcctgcctcagcctcctgagtagctgggcccacaggtgcaccatcatgtccagctaatttttttttttttttttgagacagagtctcgctgtgtagcccaggctagagtgcagtggcgcaatctcggctcactgcaagctccgcctcccaggttcacaccattctcctgcctcagcctcccaagtagctgggactacaggcgcctgccaccatgcccgactaattttttgtatttttagtagagtcagcgtttcatcgtgttagccaggatagtctcgatctcctgaccttgtgatctgcccacctcggcctcccaaagtgctgaaattacaggcgtgagccatcgcgcccggcccaatgtttatattttttgtagagatggggtttccccatgttgcccaggctggtctcgaactcctgggctcaagcaatcctcccactttggcctcccaaactgttgggattataggcgtgagccactgctttgatttacctctgccttgccctctacactggcagagccccaaagtctgggaaggctttgttctttctcattgttatagctctgaggcttgcacagtgcctgccacaaaaggtagtggtggggtctcacggaaatcactgaggaaggaagggaggttaaaggtggtagcatagcagagctatgtaagaaatcacctggagggctgggtgcggtggcttatgccagtaatcccagcactttgggaggccgaggtgggtggatcacctgaggtcaggaaatctagaccagcctggccaacatggtgaaaccccgtctctactaaaaatacaaaaattagccgggtatggtggtgcatgcctgtaatctcagatactggggtggctgaggcatgaggactgcttgaaccccaggggtggaagttgcagtgagcaagacccagtctcaaaaacagcctttgggaggctgaggcagatggttcacctgaagtcaagagttcgagaccagcctggccaacatggtgaaacctgtctctgcgaaaaatacagaaattagccgggtgcggtggcacatgcctgtaatcccagctacttgggaggttgaggcaggagaatcgcttgaacccgggaggcagatgttgcagcgagccaagatcacgtcaccgtactccagcctgggcaacctaagcctgggtaacgtagtgagagcctgcctctacagaatattaattaattaatttggagacacagtctccctctgtctcccacgtagagtgcagtggaacgatctgggctcactgcaacctctgactcccaggttcaagcgattctcctgcctcagcctcctaagtagctgggattacaggcgcctgccatgacacatgactaattttttttttgagacagagtctagtgaggctggagtgcaatggtgtgatctcggctcactgcaacctctgcctcccaggttgaagcaattctcctgcctcagccttcctagtagctgggattacaggcgcctgccaccatgcctgcctaattttttgtatttttagtagagatgggggggttccgctatgttggccaggctggtcttgaacttctgaccttgtgatccacctgccttggcctcccaaagtgctgggattacaggcatgagccgtcacacctggcctctacagaaaatttaaaaatgtagtcccagctaaatgggaggctgaggtgggagggatcccttgaacccaggaggtcgaggctacagtgagttatgatcaaagttctgcactgcagcctgagcaacaaggcaagacgctgtttctaaaataatagtaataattattattataaattaataagctactaaaataaactataaaataacaccaccaacaataataataatggctggcactcattgaacagatatttgcaggcaaacattttacttatatttgcttttcccttttttttttttttgggacagaatctcgctctgtcgcccaggccggagtgcagtggcacgatctcggctcactgccacctctgcctcccaagttcaagcaattctcctgtctcagcctctggagtagctgggactacaggcaccagccaccaagcctggctaatttttgcatttctcgtggagacggggtttcactgtattggtcaggctggtctcaaactcttgacctcgatctcaaaaacaaaacaaaacaaaacaaaaacaaaaaaacaagactgctctacttggaggccatatcattggctgcatgtagagttgcaattgtgtttcctggtgaactgaacctttttttttttgagatggagtctcaatctgtcgcctaggctggagtgcagtggcaagatctcagatcactgcagcctctgccccttgggttcaagtgattctcctgcctcaccctcccgagtagctgggattacaggcacccgccaccacgcttggctaatttttgtatttttagttgagacggggtttcgccatgttggccagggtgttctcaaactcctgatctcatgtgatccacctgcctcggcctctcaaagtgctgggattgcaggcatgagccagagcgccaggcccgatctgaacctttcattgttaagatgtgcccctctttacttctttcatttttcccttagagtgcactttgttaagattgcacaccaagcttgggcatggtggctcactcctgtaatcccagcactttgggaggccgaggcgggctgatcacgaggtgaagagatcgagaccatcctggccaacatggtgaaaccccgtctgtactaaaaacagaaaaattagctgggcatggtggcacactccagtaatcccagctactcaggaggctgaggcaggagaattgcttgaactcgggaggcggaggttgcagtgagccaagattgcgccacttcactctagcctggagacagagctagactccatctcaaaaacaaaaaagaaaaaaaaattacacaccaattctccttggttcatgttttctttctttctttctgacacaaggtctcactgtgtggcccaggctggagtgcagtggcacaatcatgagtcactgcagcctcaatcacccacgctcaagcaatcctcccagctcagcctctccagtagcttcaactacaggtgtgcaccaccatgcccagctactttttttatatttattgtttgtagagatggagtcttgctacattgctcaggctgttctcaaactcctgggctcaagcaatcctctcacctcggccttgcaaagtgctgggattataggcatgagccattgcgcccgggtccatctttgttttttaactggggaatttggtctattggtatttaatgtaattatggacatatctagacataaatctgtctcattaggtggttttcctcttttttttttttttttgagatggagtcgctctgttgctaggctggagcagtgatcacgccattgcacttcagtacaggcaacagagtaagaccctatcacacacacaaaaaaggaaatgaaatggaaaaaagtggcagagaaagccttccagtccccaaacccgacccccgaaagtccccatctctgggcagactgaatgttcgcataactttctatcctctcccttcatcatacaaaaaaacatgttcttatctcaagtccagtgtatacaaaacatcaggggccagccaagtcccttttggcctcaatctatagtccccaccccttctaagaccctcgtaaatgttccttggcttccaaaagagccccaaggacccactgaaaagtttgattttggcttggcactgtggctcatatctgtaatcccagcaatttgggaagccaaggcgggtggatcacttgaggtcaggagttcgagaccagcctggccaatatggcgaaaccctgtctttaccaatacaaaaattatctggacatagtggtgcatgcctgtaatcccagctactcaagagggtagggcaggaaaatcacctgaatctgggaggccgaggttgcagtgagccaagattgcaatactacactccagtctcagtgacagagcaagacctggtctcaaaaaaaaaaacaaaaaacaaaaaaaaacaaacaaacccgggcgcagtgctcatgcctgtaatcccagcactttgggaggctgaggcgggaggatcacaaggtcaggagattgagaccatcctggccaacatggtgaaacccctctctagtaaaaatacaaaaattagccgggtatagtggcatgtgcctgtaatcccagctcctcaggaggctgaggcaggagagtcacctgaacctgggagacggaggttgtagtgagctgagattgtgccactgcactcctgcctggatgacagagtgagactctgtctcaaaaaacaaacaaacaaactgttgaactaaatatacaagaattctagtcaggcgcggtggctcacgcctgtaatcccagcactttgggaggccgaggcaggtgaatcacaagatcaggagttcgagaccagcctgaccaacatggtgaaacctggtctctactaaaaatacaaaaattagatgggcgtggtggcacacacctgtaatcccagctacttgggaggctgagccaggagaatcgcttgaacccgggaggcagaggttgcagtgagccgagatcgcaccactgcactccagcctgggcgacagagtgagattccatctcaaaaaaaaaaaaaaaaaaaaaagaattctagccaggtacagtagctcacacctgtaatcccagcactttgggaggccaaagcgggcggatcacctgaggtcaggagtttgagaccagcctggccaacatggtaaaaccctgtttctagtaaaaatacaaaaattatccaggtgtggtggtgggtgcctataatcccagcttctggggacgctgagacaggagaatcacttgaacccagaaggtggaggttgcagtgtgctgagatcgcaccactgcactccagcctgggtgacaaagtgagactctgtctcaaattaaaaagcaacagcctggccgggcgcggtggctcacgcctgtaatcccagcactttgggaggccgaggcgggcggatcacgaggtcaggagatcgagaccatcccggctaaaaaacggtgaaaccccgtctctactaaaaatacaaaaaattagccgggcgtagtggcgggcgcctgtagtcccagctacttgggaggctgaggcaggagaatggcgtgaacccgggaggcggagcttgcagtgagccgagatcgcgccactgcactccagcctgggcgacagagcgagactccgtctcaaaaaaaaaaaaaaaaaaaaaaaaaaagcaacagcctgggcgtggtagctcacacctgtaatcccagcactttgggaagccaaggaggggtggatcacgaggtcaggagttggagaccaagctggccaacatggtgagaccctgtctctactaaaaatacaaaaattagctgggtatggtggtgcacacctgtaatcccagctactcgggaggctgaggcaggagaatggcttgaatacgggaggcagaggttgcagtgagctgagatcacgccactgtactccagcctgggcaacagagtgaggctcagtctcaaaaaaaaaaaaaaaaaaaaaaccgccaccaacaacaaaaaccaattgttgaactaaatatataagaattcctgccgggtgtgatggctcatgcctgtaatcccagcactttgggaggccgaggcgggctgatcacaaggttaggagatcgagaccatcctgtgaatggtgaaaccccgtctctactaaaaatacaaaaaaaaaaaaaattagctgggtgtggtggcaggcacctgtggtccttgctactccggaggctgaggcgggagaatgctgtgaacccaggaggcagagcttgcagtgagctgaaattgcgccactgcactccagcctgagcgacagagcgagactctgtctcaaaaaaaaaaaaaggattccagtcctcattgacttcttttttttttttttctgagacagggtctccctctgttaccgagcctggagtacagtggtgaaatcctagcttactgcagcctggaacttctgggatcaagtaattcttccacttcagcctcccaagcacctgggactacagatgtgcaccaccacgcccagttaatttttaaaattttttttagaaacaaggtctcaatgtttcccaggctggcctcaaactcttgggctgaatggatcctccagcctctgcctcccagtcactgactttcccatgaatgacggcagcagaacctgggagcgatattatcaacagtttactgagggcttactgtgtaccaagtcttgttgtaaggattttgcctacgtgatttcatagagttaagccgcttgcccagggccattcagctaggatttaaaactcagatatgtgtaattccagggctctgaaacagtcttcatgtgcccaagaacttgtgtgtttatcttccaagctctcaacaaccttcagagatagatgttgtgattacacagactcgcaattaacagagactcagagaagttacaaatataatttataacatacacaccgtatagaatctcaatagctaacagtaattacttgtaaacattaattttatttttttaaacctaatgacacacttctgaaaagcaaacatgtatggagcaattactattcaccttgttttgttcatacatttaacttggattatctcactttaaaaaaggcatcctagtggccgggagtggtggctcacgcctgtaatcccgcactttgggaggctgaggccggcagatcacctgaggttgggagttcgagaccagcctagccaacaaggagaaaccccatctctactaaaaatacaaaattagtagggtgtggtggcacatgcctataatcccagctactcgggaggctgaggcaggagaatcccttgaactcagggggcagagattacggtgagctaagataacgccatcatactccagcctgggcaacaagagcgaaactctgtctcaaaaaaaaaaaaagaaaaaaaaaaaggcatcctaggtagggcgcggtggctcatgcttgtaatcccagcactttgggaggtcgaggtaggcggatcacctgaggtcgggagtttgagaccagcctgaccaaatggagaaaccccatctctactaaaaatacaaaattagccggatgtggtggcgcatgcctgtaatcccagctactcgagaggctgagggaggagaatcgcttgaacctgggaggcagaggttccaatgagccgtgatcctgccattgcactccagcatgggcaacaagagtgaaactccacctcaaaaaaaaaaaaaaaaaaagcatccttggccgggcgcggtggctcactcctgtaatcctagcactttgggaggccgaggcaggcagatcatgatgtcaggactttgagactagcctgggcaacatagtgaaaccccgtctctactaaaaatacaaaaaattagccgggcatggtggtgggcgcctataatcccagctactcaggaggctgaggcaggagaattgcttgaacctgggaggcagggttgcagtgagccgagatggcgccattgcactccagcccaggcaacaacagcgagactctgtctcaaaaaaagaaaaggcatcctcatctccgtatgaattcatggtttgtatttattttttattttttgagacagggtcttgctctgttgcctgactggagtgcagaggtgcaatcacggctcactgcagcctccacctttgggactcgggtgatctcacctcggcctcctgagtagctgggactacaggcatgcgccaccacgcccagctaatgtttttgtttttgtttttgttgttgttttgagacagagtctcactttgtcacccaggctggagtgcaatggcgcgatctcagctcactgcaaactccgcctcctgggttcaagtgattctcctgcccagccttgtgtgtagctgggattgcaggcacgtaccaccatgcctggctaatttttgtatttttagtagagacgaggtttcaccatgttggccaggctggtctcaaacccctgacctcatgatccacctgcctcggcctcccaaagtcctgggattacaggcttgagccactgcacctggccactgagccaccgcgcctggccacttgttttgttttttgagacagagtctcactctatcacccagctggagtgcaacggcacgatctcggctcaccgcaacctcagccacctgggttcaagcgattctcttgcctcagccttccaagtagttgggataacaggcatgcgccacctcgcccagctaatttttgtgtttttagtagagacagggtttcgtcatgttggccaggctggtctcaaactcctgaccccaggtgatctgcccccctcagcctcccaaaatgctaggattacaggagtgcacctggccatgtttgtattttttgtagagacagacttttgccatgttgcccaggctggtctcaaactcctgagttcaactgatctgcccgcctcggcctcccaaagtgctaggattacaggcatgaaccactgcacccagcttcatgatttgtatttatttggagaatgggtctctgtcacccaggctggagtgcagtggcttgatcacagctcactgcagcctcaaactcctgggtttaagtgatcctcccacctcatccttctgagtagctgagattacaggtttgtgccaccacgcctggcttattgtttagctgtgcctgctgacgggtacctctagaagcagtgacaccccagcagcaatgagcacacacagcacccagatcttagtttaattttttttttttgaagacagagtctcactctgtcccgcaggccggagtgcagtggcgcaatctcagctcattgcaacctctgcctccctggttcaagccattctcctgcctcagcctccctagtaactgggattacaggcacacgctgccacacccggctaactttttgtgttttagtagagacagggtttcactgtgttgcccaggctggtcacgaactcctgagctcaggcaatctgcctgccttggcttcccaaagtgttaggattacaggcatgagccaccgtgcccggccttttttttttttttttttttttgagatggagtcttgctctgttgcccaggctggagtgcagtggcgtgttcttggctcactgcaacctctgtctcctgggttcaagcaattctcctgcctcaggctcccgagtagctaggactacaggtgtgcaccacaatgcccagctaattgtgtgtgtgtggtgtgtgtgtgtgtgtgtgtgtgtgttttagtagggacggggtttcaccatgctggccaggctggtctcaaactccttacctcaggtaatctgcccgcctcggcctcccagaatgccgggattacaggcatgagccacagcacccggctaatttctttctttctttcccttctttccctccctccctcccttcctttctttccttctttcttttttttttttttttttgagatggagtttcgctcttgttgcccaggctggagtgcagtggtgtgatctcggatcactgcaacctctgtctcccaggttcaaacgattctcctgcctcagcctcccaagtagctaggattacagggatgtgccaccatgcctggctaattttgtatttttagtaaagacagggttactccatgttggtcaggctggtctcgaactcccgacctcaggtgatctgcccacctcagcctcccaaagtgctgggattacaggagtgagccactacacccggcctctttcttttttgttttgagacagagtttcgctcttgttgcccaggctggagtgcagtgggtgatctcagctcactgcaacctctgcctcccagttccaagtgattctccagtgtctcgagtaactgggattacaggtgcccaccaccatgcctggctaatttttttgtgtttttaatagagatgggggggtttcatcatgttggcccaggtggtctcgaactcctgacttcctgatctgcccacctcagcttcccacagtgctgggattacaggcgtgaatcactgagccccgactgatcttggtttctaaatcctactcttgaagcaaaggaaccaggttccttggagaaatggctgattccagggattttacacagcattggatcatgttgtggagcccaagataaataatgctcagagaatggtggcgacatattaaaaggacacaggagcttatttattatttatttatttatttattgagacggagtcttgctctgtcgcccaggctggagtgcagtggctcgatctctgctcactgcaagcttcgcctcccgggtttgcaccattctcctgcctcagcctcccgagtagctaggaccacaggcacctgccaccacgcctggctaattttttgtatttttagtagagatagggtttcaccatgttagccaggatggtctcaatctcctgacctcatgatccgcccgcctcggcctcccaaagtgctgggattacaggcgtgagccactgcacccagccaggagctaatttaaaggggcaggaaaggaaataattataattataatgatgtggatttattaatccacatcagtttatagcgatttttgttgttgttgttgttgttgctttttgagacaaagtctcattctgtcacccaggctggagtgcagtggcacaatctcggctcactgcaatctccgcctcccaggttcaagagattctcatgcctcatcctcctgagtagctatgattatagcacctgccaccacgccaggctaattttttttttttttttttggatttttagtagagacggggtttcaccatgttggccagtctggtctcaaactcccgacctcaggtgatccacacgcctggcatcccaaagtgctggggttacaggcgtgagccactgcgccgggcctgtttgttttttgagactgggtctcactctgttgcccaggctggagtggggtcttcgttcactgcaacttctgcctcctggcctcaaacgatactcctacctcagcctcttgagaaactgggaccacaggctcgggccacaggcccgtttttttttttttttccaattgtagctgtgaggcattttattacaaaaacttggtactcgtatacacaaactaacatgaacttaaaatacattttcttcattttttagcttgaccttcttttttttttttgagacgtggtcttgctctatcgcccaagctggagtgcagtggtgcgatcttggcttactgcagcctctgcctcctgggttcaagcgattctcctgcctcagcctcctgagtagctgggattacaggctcccgccaccactcccgactaattttttttatttttagtagagacaaggtttcaccatgttggtcaggctggtctcgaactcctgatctcgtgatccgcccgcctcggcctcccaaagtgctcggattacaatgacaggatgtgagccaccgcgcccagcctgtaaacccttttgaaaaaattccccagcgcattactccaaaacaacgtggaagtgtaaatggaaaccagggctgggcgcggtggctcatgcctgtaatcccagcactttgggaggccgaggcgggcagatcacctgaggtcgggagatcgggacccgcctgaccaacatggagaaaccctgtctctactaaaaacacaaaacttgccgggcatggtggcacatgcctgtaattccagctactccggaaggctgaggcagatgaatcgcttgaacctgggaagcggaggttgcggtgagccgagatcacgccattgtactccagcctgggcaacaagagcgaaactctgtctcaaaaaaaaaaaaaaaaaaaaaaaaaggaaacttggaccaaaaaaatcagcaaaagtggagcagggatgtctgaacacagatgagtctaattccctgcttggaaagcaggacacctgagtgtggtttggcctctgaccactgtagcatttacgaccttggggagggttaccactctgggacctcagtcacactatctacaaaatgggacacttctctcagccttccttcttccgggccgctttcaagcctgggcttctggaaatacgcaggcgcgagatgaattgtttgattggctattcattgtgatgcacccacgagctgaagctccgtctaagccccgccctttcctgtcgtgacttaacgcacgcaagcggctccagggtacgtccccgccacgcgcgctcgcaggatcggtgcgtggtgacgtttcgccggcgcgggcgccatcccggaagcgcgagcaaggccgccagatgtgcaggtgccgccgctaccgacgccggggccgagtttggggtggggctggggactccagggccgcggggaaccggtccgggtcgggcgcggcccccgggctgcggtggggtggggtgcgccactggccacatctggtcattcctgctgcgcacaggcctcagtttccccgtctgctcaatggatacgcaggcggcgctacgggctggatctggatccggatcaggggcataggaattggggcctcctgtgttctgggtgtgtcgtgtaacctggagctgggcgttgcccggtttgtgcctcagtttccctgtattgtaggggacggggcgtgaggggatatttgagcccctccccacttggggtttttcagagcttggatggctgagttaaattctgttaaataacctggatatagaaccgtggtgcttctctgcctctccctgtgagtttcggcaacggagcccgcccctgtgagcctcagtttcactcggagatgattgtgtctgcctcgtaacggtgattgaggatgaaatgaagtgctctacaagtgtttgcccgtaatatattcttagaggcccctgggatgctctcaaaatgttgattcccgggacttcttcacactcctcttggagaaacagcctgtcctgagctccagtcgttatcacctttggtttcagttgccacagacagcactgtgagatcttcattctaccttattttcattttatggttgaaaaaactgattcagaagggtgaagtggctctcccatggtcaaacagcctacctctctgcgtttcttcaataaatctacatttggagttgggatcagagctcttgctgggtcaatttcactgtgtatgtgggccagactagcagtaatcagggaaggcttcttgggagaggaagttgcggggggacgggagggaggtgccaggaacccctcagccctcacatctgggagccagagacagaaaagagtcctgttttgaaggaggagtgtatcccagaaggtcccagtactgtgtctcactggtactagctatgggcctccctctccaggtgtctttttttttttttttttttttttttcagttgagatgaagtctccctctgtagcccacactagaatgcagtggcttgattttggctcattgcaacctctgcctcccgggttcaagcgattctcctgcctcagcctcctgagtagctgggactacaggtgcccgccatcatgcctggctaatttttgtatttttagtagagacgggggtttcaccatgttcaccaggctagtcttgaactcatgacctcaggtgatccaccagccttggcttcccaaagtgctgagattacaggcatgagcacccggtccaggtatcctctttatacaagatcatgcttctttgggaatgtggagactgggtgtctctgcatggcatgtcataggagttcaataaccatagttattattagagggaagggggttttgctgggtgtggcaccttatttctagaaggtgctgcaaaccactgaccagatacagatcacaaatagatgctcttggcctccatgatatcttggaaaaaagtattgattgctgacatttgtcaatgaggcaatttcccagaaaaaaaaaatccctgtttcctttttcctggagaaacatcagaagtcaggcagaaatcagctgctgtaagaagccactgtcctgtcacagctggatattgtgcacctgttcagattcacacctttgtgagacccgtgggctgtggccgtttgttgtgacttaggttcactggctgtgtgacagtggcccagtttctcagtgtccctgagcctcagttttctcatctataaataagaatgataacagtatgtatgagcttgatgctttgtttagcatagagtagctgctgaataaatgggagagtacattaagtgagctctgaaaccctttctttctctttcctttctttctctctttctctgtctctctctctttctctcctctctctttctctctttgtctctctctctttctctccttctctctctctttctctctctcccttccttccttccctccctccctcccttccttccttcttttcgagatggagtctcactctgtcgcccgggctggagtgtagtggcatgatctcggctcattgcaacctctgcctcccaggttcaagccattctcctgcctcagccatccaagtagctgcgactacaggtgcccgccaccatgcccggctaattttttttgtatttttagtagagactgagtttcactatgttggccaggctggttttgaactcctgacctcaagcagtctgcccacctcggcctcccaaagtgctaggattacagacgtgagccaccacacccggcctctgaaaccctttctgatccagtagaagttcgtctctgtttcttggctattaaatgtgtgggcctcagagccaaactatatcaagatcctagatttttcctgaactccctaggagggtcagtgctgtagcccctcctaccctggctgctccgggaagtccctgcctgccattacggtcatctgtgtgccagcaaaactgggaacctcagaaccatctggattgctggggcccacaggttggctgtgagtacctgcaattcttggctttaatttgctaataaaagtgtcacgtcagagctgagtttgaaaagttctgttgcccttccccacaacaacattctggcagccccttgctatgagccagactccgggtcgggttctggtgacagacacacctctactccttcttttttttttttgagacggagtctctctgttgcccaggctggagtgcagtggcacagtcttggctcaccacaacctccgcctcctgggttcaagtgattctcctgcctcaagctcccgagtagctgggactaaaggtgcccaccaccatgcctggctaatttttgtatttttagtagagatggggtttcactatgttggccaggctggtctcgaactcctgacctcgtgatccacctgcctcgccctcccagagtgctaggattacaggcgtgagccacagcacctggccacctctgctcttttggagctgacgttgtggcggtgacaggcaaacgggttagctgataactaggataatttcatgaagaggtgaaccagtgaagcagttaaatcaaggtaaagggtggctgggcgcagtggctcaggcctgtaatcctagcactttgggaggccaaggcaaaagggtcgtgtcagcctaggaatttaagagcagcctaggcaacatagcgagaccctgtctcttaacaaacaaacaaacaaaaacaaggtaaagtagcctgggcgcggtggctcatgcctgtaatcccagcactttgggaggctgaggcgagtggatcacctgaggtcagtagttcgagaccagcctggccaaaatggtgaaaccccgtctctactaaaaaatacaaaaattagccaggcgtggtggcgggcacctgtaatcccagctacttgggagggtgaggcaggagaatcgcttgaacctgggaggcggaggttgcgctaagccaagatcgcgccattgcactccagcctgggtgacaggagtgaaactctgtatcaaaaagaaataaaaaaacgaggtcaagtagtaagagaagcggtaagagtgacgggaacaggagtcattgacctcttgggagaggagacattggaggtggtgatgatttgctgaagcagccacacacgttcagcttgtgaggacagcagttgttaggcaggggatgagggaggaagctggcagatctgtgcaggtgagaggtacctgtggccttgggctcatggaagtgggaggtgatgggattctaatgtgcttgggtacagtttacaaatacaacctctcttagtttgcccaatacctccaaattcctggggtggcacacctgaggttcaggtggcatgactgagccacagtcacacatccccactgtaggataccaccacggttgggttaggttccagcacatggcggtcccggcctggcctcttggtcccacctcacctggtgactagtgcagaccactctgttcttgcctgtttcaggcagcggaggaggagaaagagatggacctcccggactcggcctcgagggtcttctgcggccgcatcctgagcatggtgaacacagatgatgtcaacgccatcatcctggcccagaagaacatgtgagtggcggctgggggacctgagcgtgggaaggaatccacaggctggccaacattcttgtcttgcccgcccctacccggggcccacactggtgataaaatgaaggaaatgagcaaatctgtcgctggctccaaagtaaattccttcccggcctggaggcgaggccttggcacaggaagcagggctttggggagattttgcagctgcggatggcttggcgggggccgcaggggctcctgtcccgagacctggggtgggagagttgaaggaccagagggggccacatgcaggtttttttgtttatttgtttcttgtttttgagacagagttttgctcttgttgcccaggctagagtgcaatggtgtgaccttgcctcactgcaacctccgcctcccgagttcaagcgatttctcctgcctcagccctctgagtagctgggattacaagcatgtgccaccatgcccagctaatttttgtatttttagtagagacgggctttcatcatgttggtcaggctggtctcgaactcctgacctcaagtgatccacccgcctcggcctcccgaagtcctgggattataggcctgagccactgtgcctggcctttatgcaggttttatgctggtgcgcctacttcctggtgaaggactagtctcccagagcccaggctgtgtctgcacagtgcccagggtctcttggagcggacataaaggcctcttgtcctcactggggtttggtgctgtggctgctgaaaccttgccctaattcaggcctgccctgtggggaagaaaggctaataccaagcttgtccaaccctcggcctgtccaaccctttgaatgtgggccaacacaaattcgtaaactttcttaaaacattacgagattttttttgtgatttttttctttttctttcttaactcatcagctgtcgttagtgttagtgtattttatgtgtggcccaagacaattcttcttccaatgtggcccagggaaatgaaaagactggacaccactgggctaatacagtcttggagtggaagcacagcctcccgcagctttgtttttgtgtctctgagccagaggctcttctcagctgtcacgacacagtacagacctgatttccttaccttttctcccagacccagagcagctccgagtctcaatagtacctgtctctctcctgtgtcttttttttttttttttttgggagacagagtctcactctgtcgcccaggctggaatgcaatagcataattgctgctcactacatcctctgcctcctgggtcaagtgattctcctgcttcagcctcctgagtcgctgggattataggcatgcaccaccatgcctggctgattttttttttgtgacggagtctcgctctctcgccaggctggagcacagtggcgcaatctcagctcactgcaacctctgcctgctgggttcaagcgattctactgcctcagccttccaagtagctgggactacaggtgtgcgccaccacggccagctaatttttgtatttttagtagagacggggtttcaccacgttgaccagaatggtctcaatctcttgacttcgtgatccgcccgcctcagcctcccaaagtgctgggattacaggtgtgagccaccgtgcccggccctgatttttttatttttagaagagatgtggtttcaccatgttggccagacctcaagtgatccaccctgcctcaacctcctaaagtgctggtctccttttttttgagacatagtttcgcactgtcacccaggctggagtgcagtggcgcaatctcaggtcactgctatgtccgcctcccgggttcaaatgattctcctgcctcagcctcccgagtagctgggattacaggcgcccgccaccatgcccagccaatttttgtatttttggtagagacgcggttttcccatgttggcaaggctggtctcgaactcctgacctcatgatctgcctgccttgacctcccaaagcgctggaattgcaggcatgagcccccatgcccggctggtctcctgtttttttaggtcagattcagacctggctctgggaaacttctagactgaggggagacaaagccagacacagaccctcctggccctatggtgtcagggctgggccagaggaacaacctggggctagtggaattaaaagagtctgattgggccaggcacgatggctcactcctgtaatcccagcactttgggaggccgaggtgggtggatcacgaggtcaggagatcgagaccatcctggctaacctggtgaaacctcgtctctactaaaaatacaaaaaattagccaggcatggtggcggacgcctgtagtcccagctatactcgggaggctgaggcaggagaatggtatgaacctgggagacggagcttgcagtgagccgagatcgcgccactgcactccagcctgggtgacgaagcaagactctgtctcaaaaaaagtctgactgaatagaggtagacaaggctacatgagaaggacacacttgagtagggttttgaaggttgaataggagtttgctaggtggctcaaagagtaggtagaactctgcaggacaagggaacagcccatgcaaaggttgtgaagcaggcaagggcttggcatgaacagtcttctgggccaggttgggcagggccctgaagctgggcagtgaagctcatgccctctctccaccatcaggctggaccgctttgagaagaccaatgagatgctgctcaacttcaacaacctgtccagtgcccgcctgcagcagatgagcgaacgcttcctgcaccacacgaggaccctagtagagatgaaacgggacctggacagcatcttccgccgtatcaggtgggtgctcagtgccaccccagcccagctgacctctgcctccacctccccatctgagcctcagtttccttcacataccagggtaaagggagatttctgtttgttttacaaggcttcactgcgcacttaagtgtctgggacaattccaaccctgggataaaatcttgacgtaagtttatttactgattgattaattgatcgagacagagttttttttttttttttggagacggagtctcgctctgttgcccaggctggagtgcagtggcgcgacctcagctcactgcaagctccgcttcccgggctcacgccattctcctgcctcagtctccggagtagctgggattacaggtgcctaccaccacgcctggagaattttttgtatttttagtggagatggggtttcaccgtgttagtagtcaggatggtctcgatctcctgacctcgtgatccagccgccttggcctcccaaagtgctgggattacaggcgtgagccactgcgcccggccgagacagagtcttgatctgtggccctggctggagtgcagtggcgtgatcttggctcactgcaacctctgcctcctggattcaagcgattcttgtgcttcagccttctgagtagctgggtctacagacatactgtaccacacccagctaatttttgttgttgttgttttatttttgaggtggagtcttgctctgtcgcccaggctggagtgcagtggtgcaatgtcagctcactgcaacctccgcctcccaggttcaagcgattctcctgcttcagcctcctgagtagctgggactacaggcgcatgctgccacgcccagctgattttttgtattttagtagagacgagatttcaccgtgttgcccaggctagtctcaaactcctgagctccagcactctgcctgcctcggcctcctaaagtgttgggattacaggtgtgagcctaatttttgtattttgtgtaatttttgtatttttttagtagagacagggtttccccatgttggccaggctcatctcgaagtcctggcctcagatgatccatccacctcgacctcccaaagtgctgggattataggcatgagccatcatgcccagccttgcagtttatttattcttaaaaaatgtaacacagtgcggctgggcgaggtggcccatgcctgtaatcccagcactttgggaggccgaggcaggcggatcacgaggtcaggagatcaagaccatcccggctaacatggtgaaaccccgtctctactaaaaatacaaaaaatactaaaaatacaaaaaattagctgggcgtggtggtgggcgtctgtattgccagctactcgggaggctgaggcaggagaatggcatgaacccaggaggtgagccgagatcgcgccactgcactcaagcctgggcgacagagcgagactccgtctcaaaaaaaaaaaaaaagtaacatagtgctagacacataatgaaaaggcaggaatggctgggcacagtggctcatgcctgtaatcccagcagttagggaggctgacgcaggcagatcacctgaggtcagaagtttgagaccagcctggccaacatgatgaaatcccgtctctactaaaaatacaaaaaaatcagctgagcatggtggcacgtgcctgtaatcccagctacttgggaggctgagggaggacaatcatgtgaatccggaaggtggaggttgcagtgagccaggatggcaccactgcactccaccctgggcgacagagtgagattctgtctcaaaaaaaaaaaaaaaatttatcagagaagaggccacatgtaagaagcagcctcgcagggggagcccccagccagtgcctaggctcagagcacccagagtctaactagttgggggttggtgcctaccttggggctggaggccggctggtgggcgactgtcagggccgtggctgctgggccgagcacctagagagagtgaagatgtgaggtgatgaacagtgtgggggttctcactcccgtctccccttgccctcagctggcagcaggggcttgtggccagcaccaggcccagcctacctgctcagcaggttaagccctgtgtgccttctctcccctgcaggacgctgaaagggaaactggccaggcagcacccagaggccttcagccgtaagtgtcacgcagggttcctgctcccgagcacgtcagcactctccacccagggcaggcttctggaaggccaccttggggcctgatactgagaccaggctgtaatgggcagtgggtctggggaaacctggggtgggggcagggtcagggtgctggcctggtcctgtcagcagctggcagagtgggcactaggacgggagtccgtgccccgtggggaggccgcacaggagaatgtggataagcagcatgacaatccttatccctgtgtgcattatgagccatctcagaacagagcacgggctcatgtgacaccagccccgacatcgtctcgccttccctgagccccagcttcgaggatctgtcccatgtccagctgttacccacagtcacccatggggtggggactgtgagtatcaccgtttcatggagagggaaacagaggcccagaggggcaggacttgagttcgcatctgtctggctagagagctcgcgtgttctctggggtaccattccatgttgccaccaccttaaagggctctgcaggctgagcctgggttcacaccatctgttgaaaaggccgacagctctccatcccagggcctccaacagcagtttacagagcagggagctgggctgaggggaggtcatatacctagcccaggtagtgcagtgagccaggttcgccctcagggctcctgtaggcctaaccccagatcttgtgtcccttcctcacctcaccttgaagggagggctcttccctgcctgggcctcagttttctcctctacaaaataaaaatgggccaagtctgccaggcgcggtggctcatgcctgtaatcccaacactttgggaggctgaggcgggtggatcacctgaggtcgggagttcgataccagcctgaccaacatagagaaaccccgtctctagtaaaaatacaaaattagatgggcgtgatgatgggcatctgtagtctcagctactcaggaggttaaggcagaagaatcgcttgaacccgggagacggaggttgcagtgagccgagattataccattgcactctagcctgggcaaagagcgaaactccgtctcaaaaaaaaaaaaaaaaaagggtcaagtcatacccccatggggtgagggcagccgttaggggtcacatggacaataagtcctacatcacagagcttggcaaggtgacaaaaccaactcttgggcctccttcccccagatatcccagaggcatccttcctggaggaagaggatgaagaccccatcccacccagcaccacgaccaccattgccacctcagaacagagcacgggctcatgtgacaccagccccgacaccgtctcgccctccctgagccccggcttcgaggacctgtcccatgtccagcctggctccccagccatcaacggccgcagccagacagatgacgaggagatgacgggcgaatagccctgctgcccggtgccttgagggggtctcagggcagcagcatacaaggtggcagcgggtaaccctgccttgttctgtcatccagggctcctttgctgccccgttctgtcacccagggctcctagggggacaaggctctctcccgaggggtgtggaattcctgggggggtctttaattctggctccttccttcctcagaacatctctattctgcaagacccctctgccatgccagggcacgcccattccagctggagtcgtggggctgggcacaggggaatttttccagagctgagcctgacgtctgctctgaagaatgcttagaaggttcccagacaccagagccagatgtcccccaccaccggtcaggacctccttgaggtgcacaagcacggtctcctctgagttcaccccagcccacccccgcacccactaattctgcttttcctgccccttgctccgtaaaagtatcaaatactttctccttggtatctcaaggaggtttctgagataggtagaagtcttgagacggaggctggccatccattcagccctgagcgtgctgagttctgtgtttctctgaatagaggtgtggaacctgaggggccagcaggcctctctgaaggcctccatggagcaaacggagccacctcgggaaagagtttaatggaatatttttgtacccgatgtttacagatgctgttgggaagttatcaataaaaagacaccattactaaaaagggaaaagtacacctagctgtggcttcttcagtccttaagccaagcaacccaaaaggagggcaagtgctggatgtggggctgggggccctgctggagggaggtgcagacaatcaggcactacagggctagaaagagatgtggcccttttttggaaccccccctggtgggagctataacaacccaagttcccgtcaccagctaggtcttccctcacgctgctgtcactgctcacaatactagtgttcccatcctcatttcataattccttctccagatctcagccttcctccagataggggagccacactagatccattccccatcagacacactcccagggttacctcatcttctgagtacttagaaattatgttgttatgaccgggcttggtggctcatgcctgtaatcccagcactttgggaggccgaggtgggtggatcacctgaggtcaggagttcgagaccagcctggccaacatggtgaaaccccatctctaccaaaaatataaaaattagctgggtgtggtggtgtacacctgtaatcccagctacttgggaggctgaggcagaattgcttgaatccaggaggcagaggttgcagtgagccaagatcgcaccactgcactctagcctgggcaaaaagaccaaaactgttgtctcaaaaaagaaaaggaaattaggttcttaaaggcatcttcccagacgtgagagtgtctgcttttgcctggtatagtagtgcctgcaaatgttcaaggaaataaacaggtacccctgttaagcctataggtaacttctcattgctccccatcttctctgtactcagcactttttttttttgttttgtttttgagacagcacctctctgttgcccaggctggagtgcagtggctgaatcatgggtcactgcaatctcaaacctatgggttcaggcaatcctcctgcctccgaagtagctgggactgcaggtgcgcaccaccacacctggatagttcaaaataaaacttttttttgtagagacagggtctcactatgtcttccaggctggtcgtgaattcctgacctcaagtaatcctccctctttgaccttccaaagtgctgggattacaagtgtgaaccactgcacccgccgtggcactttttttttttttttttttttttgagatggagtctcactctgtcacccaggctgggtgcagtggcgtgaactcagctcactgcaacctccacctcccggattcaagcgattctcctgcctcagcctcctgagtagctgggattacaggcacccgccaccacacctgaaaaatttttgtaattttttttttcttttttgagacggagttttgctcttgttgcccaggctgtagtgcaatggcactctctcggctaattgcaacctctgcctcccgggttcaagcgattctcctgcctcagcctcctgagtagctgggattacaggcatgcgccaccacgcccagctaattttgtatttttagtagagatgcggtttctccatgttggtcaggctcgtctcgaactcccgacctcaggtgatccgcacatctcggcctcccaaagtgcaggcgtgagtcaccggacccaggtcccgccctggcactttttaaccacccacaaatctggatcctacactgaaaagagacactgcagtggctcacgtctgtaatcccagcactttgggaggccaaggcgggcggatcacctgaggtcgcgagtttgagaccagcctgaccaacatggagaaaccccgtctctactaaaaatacaaaagtggccaggcatggtgtcgcacacttgtaatcgcagctactcgggaggctgaggcaggagaattgcttgaacccaggaggcggaggttgcggtgagccgagatcgcgccattgcactacagcctgggcaacgagagcgaaactccgtctcaaaaaaaaaaaaaaaaaaaatcctgagtcccgcttgacaccttttgtcaggcaccaccacctttctgggcgaatgcggtagtaccgtctgctctccctgctgctgtcctgaaatccattcaggcacagcggccgagagctttataataaccgattccaggtgttaggtgctttcccagccccgactcctgcgtcctggacccgcagtcctctgcttaatacctttgctttattagaaaacattctcctctactccgttcagctattcgctgagggcccgccaaccgccagcggttgtcagtggcctagaggcagcggacgcaaacacggggagaggtgcaatcgtctcaagtgactcggcgggcggggcccacaaccggaagcgggtgggcgaccttcacccacgtgcgctgcggcttcgttcgccagcatccaagatggcggcagggcggggcccaaggcgcggcgcgaattgtgacgcaggcgtccggcgtgctccgtgcgcaagcgctttcggcggcgattaggtggtttccggttccgctatcttctttttcttcagcgaggcggccgagctggttggtggcggcggtcgtgcgggttcgcgccgggccgagagcgggttgggggctgcgggaggctgcaggggcctgggcggcagaagaggcggccctgagctggctcatgcgggccagtctcggcagggtggctgggcagggctcgcgaggccacggctcggagcccagaccggggcccaggaggcgagcgccgttttggagaggagcctgcctgctctgcctgccagcgtgaccccacgaggcctcgggcgggaagaggtcctcggggcagatccgagttaatgagagaggggtattgagcgtgtagcgttaactctgccagtcactgcgtcagtcgctttggaaatactaaatttctcgagctgagtcttcatacctggctccattactacgtctgtaaggaggagctggtggtagtgtctgctttttagacttttctttagactatttgtatttttttcagatggagtcttgctctgtcgcctaagctggagttcagtggtgcggtctcggctcactgcaatctccacctcccgggctcgagcgattcttctgcctcagcctcccgagtagctgggattataggcgcctgccaccacgcccagttgatttttgtagttttagtagagacggagtttcaccatgttagccaggctcatcttgaactcttgacctcaaatgatccgtctgcctcggccttccaaagtgctgggattacaggcatgagcccctgcgcccggtcgattctttgtctttttaagtcaacttttatatgtgaacaatgcttggcaggtggttggtagatactaagtgatgttcgtggtttggggtcaaggcaagaagtggggtctggagagttttggtgtaattgagaaggaagctaagagtgttgggtgctccagcttggagttagagaggagagaggctgcgacaggaaggcatgtgtgttgtaggggatggcttcccatccaggctggcagcaggagcagcctgtgcagatcaggacctggctgccgtggaagagggtgggaccgccttcagggaagatggatctagcaagatgatgccaaagggtacttattccatcaggagatactgacgagtccttccgccgctaaacctaaggagaataaccacagtctgtgttcctgaagagcacccgtgcggtcaggagggtggaggacatgtggtctttagttccaggacatgtttagactacaggccagggtgtgtgagaagcctagcagggccaggcttggaggagtgaaaggaagacaggtactggggcaggaccagttggacttggtgcaggcaaagggatagcaactgtggtgtaggcacctgagcttgtgctactcaggcatgcattgctcaccagtctatcctgcctcccttcctcctgcagacgcaaacatgcagatctttgtgaagaccctcactggcaaaaccatcacccttgaggtcgagcccagtgacaccattgagaatgtcaaagccaaaattcaagacaaggagggtgagtagggctgggtgtgggggctctggctgtgaactgggagtccctctctgcccaggggagtctcagtcctgtgtgggttgtgctgactttagatctgttttgcccttgcttctccatgtgatctgaagaacgtttgttatcttctacctcagttggccttttgagaaactgggggtagtgctggagctcccctgcagaggacactgccagtaatatggtccgcagagcctctaactgagcctccctccccctcaggtatcccacctgaccagcagcgtctgatatttgccggcaaacagctggaggatggccgcactctctcagactacaacatccagaaaggtaccggggttggggttgctgggcagggacccaagatccccaggtcctaggaaaggagcattgatggcctcaggggttggggagcagttcaaatgacttgtgttttgtttaaaataatgggactgggcacagtggctcatgcctgtaatcccggcactttgggaggcttaggcgggtggatcacctgaggtcaggagttcaagaccagcctggacaacgtggtgaaatcccgtttctattaaaaatacaaaaatcagctgggtgcagtggctcaggcctgtaatcccagcacttcgggaggctgaggcgggcagatcacaaggtcaagagattgagatcatcatgaccaacatggtgaaatcccatctctactaaaaatacaaaaattagctaggcatggtggtgcgtgcctgtagtcccagctactcaggaggctgaggaaggagaattgcttgaactcgggagacaaaaaaaaaaagtcataatgtgaatttttttatcactgcaataaggaaattagtgtcacttgtgggagcgacaagaattcagtgtcctttttttgtgagacagagtcttactctgtcacccaggctggagtgcagtgacgcgatctcactgtgacctccgtctcccgggttcaagcgattcccctgcctcagcctcccgagtagctgggattacaggcacccgccaccacgcccagctaattttttttgtatttttagtagagacagggtttcactacgttggccaggctggtctcttaaagtgctaggattacaggcgtgagccatggtgccccgcctagacttcagtgtctgaccttgcctgaaccacttagaggtcggcttccatgttagaaacccagatggatgcctcagttggcatgtgtcagtctcagactccccccagggctcgtggtcagtgctgagatggagatttcctggggcaggctggctgggacagtgtatcttccacacgtagaacactcgggggatcccgacttggtgtccccatcacacttgagaaagcagcagactataggccctggagggtcctgcccctgtgactgaggagccagggctgggctcagtcgccgtccttctggctgtctcctgcagagtccaccctgcacctggtgttgcgcctgcgaggtggcattattgagccttctctccgccagcttgcccagaaatacaactgcgacaagatgatctgccgcaagtatgtgtgctccgatgcttggggggctgtgggggctgccggagtcggggtatgccctcacccacccctcctgtctctgtgcaggtgctatgctcgccttcaccctcgtgctgtcaactgccgcaagaagaagtgtggtcacaccaacaacctgcgtcccaagaagaaggtcaaataaggtggttctttccttgaagggcagcctcctgcccaggccccgtggccctggagcctcaataaagtgtccctttcattgactggagcagcaattggtgtcctcatggctgatctgtccagggaggtggctgaagagtgggcatctcccttagggactctactcagcactccattctgtgccacctgtggggtcttctgtcctagattctgtcacatcggcattggtccctgccctatgcccctgactctggatttgtcatctgtaaaactggagtaaaaacctcagtcgtgtaattggtgggactgaggatcagttttgtcattgctgggatcctgtcaggcactttgaggtgtccctcaggccttggccctgaagtgtctaggtgtgtggagatgggtagaaaattaggtacacccaatggtgtagaacgttgattctcaaatttttttattttatacaaatggggtctcactatgttgtccaggctggtcttgaactcctgggctcaagccatccgcccatctcagcccctcaaagtgttgggattacaagcaagaactgccatgcctgacccagttctcagttttttgtttgtttgtttgtttgtttgttttgagacggagtcttgctctgtcgcccaggctggagtgcagtggcgcagtctcggcttactacaacctctgcctccggggttcacatccttctcctgcctcagcctcccgagtagctgggactacaggtgcccgccacaactcctggctaattttttgtatttttagtagagacggggtttcactgggttagccaggttggtctcgatctcctgaccttgtgatccattcgccttggcctcccagaatgctggtattacaggcgtgagccagcacgcctggcccagttactcagttttgaatctgaggccgtgacatcactcatggtctgcagtcagtgctctgcccctgagctgtaccctctcctatgataatcactcttaagaagggcaacccttggtgttttccccttaaggtcacccaggctggaatgcagtggtgtggtcatggctccctgtaccctggaactcaggcttgggtgatcctctctcctttgcctccgaagtagccaggactacaggtgtgcacccaccaccacactcagataattgctttggtgtttttaaagcttgtaatgatcagtaggctgaggtgggcaaatcataaggtcaagagttttttagatggggtgagcacagaccaattcctgttttatttactgatttaaaattttgagacagtctcactgtcacccaggttggggtgcagtggtaggatcatagcttgctgcagccttgatctcccaggatcttgcctcagcctcccgagtagctgggactgcatgcttgtgccaccacactcggttaatattttgtagagatggggtcttgctatgttgcccaggctggcttcaaactcctgaacttaaaagcctcctgtttagttttggttttttatcactttttttttttttttttgagatggagccttgctcccatcgtgcaggctggagtgcggtggcgcagtctcggctcactgcagcttctgcctctcgggttcaagcgattctcctttctcagcctcttgagtagctggaattaccagtgtgcgccaccaccaccacgcctggctagtttttctgtttttagtagagacagggttttgctatgttggccaggctggtcttgaactactgacctcttgtgatctacctgtcttggccttccaaagtgctaggattacaagcgtaagccacagcgcctggccttgctacatttttttttttttttttttttttacagacatggtctcgctatgttgcccagaatggttttgcactgggtccaagcagttctgccgcagcctcccaaagtgctgggattacaggggtgaggcaccttgctggcccctgttttgattagggtgcagtgctggtgaagccggtgcacgaggccagtgatgcatcctaatgaggggtggagttggcgggacttcctgggccagtttggggactttcacaaaagacccccatgactcagggttttgagttcttaactgatcgaatgaaggattcaaaattaaccactccaaggggggattgaaggaagaaccactcttaatggacaaaaagaaagaaaggggagggagtaacagggatatgagctctagccgcccaagctagcaatggcaacccttctgggtccccttccagcatgtggaagctttcctttcgcttcattcaataaacagctgctgctcactctcctggtccgtggactctttttgaactgttaacactccccgcaaaggtccgcagcttcattcttcaaagttagcgagaccaggaacccatcggcaggagaaactgactcatcgtgggggctcacccaggatttccaaagcggtaacatcggacctctttcgcttgctactctgctctacttttctttagaattgagggcaaacaccgggcacctgtcggccatttaaaagcgacaagtgccgccgcctgactaaagacacagatgtaagggtatctgagaaagggctctctaacaacccccagcccttctgaatcgagagtgttgttttgcctagaaaccagttcccactttctctgcattttctgggttgaaccgagggctggccaagggtggaaaacagtggccccaagctcctggtaacgcccagtcgagatgacagcgctttgtgaaacctttgttaaacagccacccaaacgcacttcacccacccttcgagaggcatgcctcctaggtccaaacgtctataaggaagactttcttgagaacttgtctccaggattctctctacccccaggatgaaaaccctctggattaggaatctaaaacaattaggatggcaaccctcagatctgtgttcctgatgtgccatggcttatttttttattttttttgagatggagtctcgctctgacgcccaggctggagtgcagcggcacgatcttggcccactgcaacctcaacctcccggattcaagcaattctcttgcctcagcctcctgagtagctgggattacaggcaccacgtgccaccatgactggctaatttttgtatttttagtagagatggggtttcacatgttggtcagactggtctcgatctgacctcgtgatctgcccgcctcgacctcccaaagtgctgggattgcaggcgtgagccactgcgcccggcccccatggcttattctaatgtagatgggcaacaatgcaaatatacaggacctgttccccatattcgacaccgaaggcaatacccaggacaatatagtgtgtgccaatggttactggaaggcttaggccatttctctttctgtcgtccccacctcactgggaaccatttcacctatcatttctcttgtttaggatcagcaatccaaactacggagctcttccactcagggtaccactcgcatttgtgggagttaagtaaaataatagaccatcgactgggagatcaaaagtagtattcttaagatggaaagcggggacaaaaggctgtagtgcatgagacactatttcagccttggcccaatcccctgttgccccccgccttaaaattgctatgtctatgtacaatctttaaggagttcatcttactggggcagtttcaagctcagaaatatgctaactggagccttgtaaaccacctaagaatacaccccaaacttagaacccactcactggaacaaaaactttcgggcgcactggtaagaggccgctaaacccagcagcctggcctccttctttgtggctaagaagggagggaaaagaatgtggttgaaactgctacgtcggtaagcacaattaaatctgataagcagggttccatgggtgattgtgcaccctggaaaatggacactaaaacagtaggggacctgctagaaccagtgtccactgggaatgactaggggtgcgggcatccctatgctttcctttcagatgggagattttccctccaaagtgaagtcgcccctgaggtgtattctgaataactgggaccaatttgatccccagacattgaagaagcagctcatatttttctgcagcactgcctggccacaatatcctcttccaggaggagaacgatggccacctgagggaagtatacactataataccatcctgcaactagatctgttttgtaaacaagaaggcaagtggatttaggtaccatatgttcagacctttttctcattaagggatgataacccacgattgtgtaagacatgtaacctgcaccccacagggagtcctcaaattctacccccatacccagtcctccccacggctcctcctactaatgccaaaccctctctggcttctacagcccaaaagggaacaaataaaagagccttcagagagccaagagaccccactggcccctggctatgtcctcttcaggctgtaggaggggaatttggcccaacccgagtacatgttcccttttctctctctgatctaaagcaaattaaggcagacttggatgaaagttctcagatgaccccaatagatacgtagatggcctgctgggtctgggacaatcttttgacctttcctggagagagatcatgttattgcttgatcagacctaacctctaatgagaagaatgctgctttaacaggagcccgagagtttggggatacctggtacctcagttaagtaagtgatagaatgacatcagaagagagcagtttcctactggccagcaagcagtccccagtatggatccccactgggaccctgactcggatcatggggactggagtcacaaacatttactgacctgtatcctagaagggttaaggagaactaggaaaaagcccatgaactattcaatgatgtctactataacccaagggaaggaagaaaaccctattgccttcctcaaaaggctgagggaggctttgagaaaatatactcccctgtcaccagattccctcgaaggccagttaattttaaaggacaaatttattactcagtcagctgcagacattaggaaaaagctccaaaagttagccttgggccgagcaaaatttggaggcatcattaaacctggcaacctcagtgttctatcatagggaccaagaggaacaggccgaaaaggaaaagcaggataagagaaaggctgcagatttagtcatgccctcagacaaaccttggcggttcaaagaggagaaaaaatggagcaggccaatcacccagcagggcttattatcagtgcagtttacaaggacactttaaacaagattgtccaaagagaaataagccgccctctcacccatgtccactatgccaaggtgatcactggaaggcacactgtcccagaggacaaaggttctctgggccagaagtccccaaccagatgatccagcaacaggatggagggtgcccggggcaagcaccagctcgtgttgtcaccctcacagagccccgggtaagtttgaccattgagggccaggaaatcgactttcttctggacactggcacagccttctcagttccactgtcctgccctggatggctgtcctcaaggtctgttaccatccaagggatcctgggacaacctgtaaccaggtatttctcccgcccccttagctgtaactgggaaaccttaattttctcacatgcctttctcatcatgcctgagaatcccatacccttactggggagggacatattagctaaatcaggagctatcatctgtatgaatacagggaagaaaagacctatctgttgtcccctacttgaggaaggaatcaaccctgaggtttgggcattagaaggacaatttggaggggcaaagaacgcctgtccagtccaaatcaaactaaaagaccccacccctttcccttaccaaagacaataccccctaagacctgaagctcgaaaaggattacaaggtattgttaaaaatttaaaagcccaaggtctagtaagaagttgtaacagcacctgtaacaccccaattctaggggtacaaaaaccaaatggtcaatggaggttggtgcaggacctcaggctcataaatgaggccataattcctttatacccagctgtacccaacccttatagattgctctctcaaataccagaagaagcagagtggtttacagtcctgaatcttaaagatgcctttttctgtatccctctacaccctgactttcaattcctatttgcctttgaggatccctcagatcaaacatctcagctcacctggacagtcttgccccaaggatttagagatagccctcacctgtttggccaagcattggcccaagatttaagtcacttcttgcacccaggtaccctaattcttcaatatatggatgacttacttctcccgttgagagaccctgtgccatcaggctacccaagactttttttttttttttttttgagacggagtcttgcactgttgcccaggctggagtgcagtggcgcaatctcggttcactgcaagcttcgcctcctgggttcatgccattctcctgcctcagcctcccgagtagctgggagtacaggcgcctgccaccacgcctggctaattttttgtacttttagtagagacagggtttcaccttgttagccaggatggtctcgatctcctgacctcatgatccacccacctcagcctcccaaagtgctgggattacatttgagcccaaggccttttaaactttctagctgatcgaggttacaaagtatctaaatcaaaggcccagctttgtttacagcaggtcaaatacctagggctggttttggctaaaggaaccagggctctcaacaaaaaacctatccagtctatactggcttatcctcaccctcagacattaaaacagttgacagggtttcttggaataactggcttttgccaactgtggatccccagatacagcgaaatggccaggccactttacactctaattaaggagacccaaaaagctaatacccatttgatagaatggggaccagaggcagaggcagccttcagaaccctaaaacaggccctaacacaagtcccagttctgggtctacctacgggacaaaatttctctttgtatgtcacagaaagaatgggaatagttcttggagtccttacccagacttgagggactaccatacagccagtagcatatctgagtaaagaaattgatgtggtagcaaaggactggcctcactgtctgcaggtggtagctgcagtggccattttagtattagaggctgtcaaaataatacaagggagagacatcactgtatggactattcacgatgtcaacggcatactaactgctaaaggaggtttgtggctgtcagacaatcgcctacttaggtaccaggccttattacttgagggactggtgcttcagatgcgcacttgtgcagctcttaacccaaacttatgctgcccagaaggatcttttagaggtccccttagccaaccctgacctcaacctatatatatactgatggaagttcgtttgtagaaaagggattacaaagggcaggatataccataggttagtgataaagcagtagttgaaagtgggcccctcccccagggaccagcacccagttagcagaactagtggcgcttacccgaactttagagctgggaaagggaaaaagtataaatgtatatacagagagcaaatttgcttatctagttctacatgcccatgctgccatatggaaagaaagggagttcctaacctccggaggaacacccattaaataccatgaagaaattatgaaattattacaggcagtgcagaaacccaaggaagtggtagtggccttgcactgcaaaggccatcagaaaggcaaaggaaaggaggcaaaaggaaatcgctgcacagacgctgaggccaaagttgccgcaagacgggacctcccattagaaacacctatggagggacccttggtatgggataacccccttcaggagaccaggccccagtattcccctgcagaaatggaatggggactttcatggggacatagttttctcccctcggggtggctagctactcaggagggaaaggtgcccatacccgcagctaatcaatggaaaatacttaaaaccgttcaccaaacattccataggggtattgagaatacccatcaaatggtcaaatctctgttcactggacgagacctccttaaaaccatccggcagacagtcaaggcctgcgaagtgtgccaaaggaataaccccttggtccattgccaagcccctcatggagaacaaaggacagggcactaccctggagaggactggcagttagatttcacttatatgcctaagtcacggggacttcaatacttactagcctgtgttgataccttcacgaattgggttgaagccttcccctgtaagacagaaaaggcccaggaggtaatcaaagccctggtccatgaaataattcctaggtttggacttccctgtagtttacaaagtgataatggcccggctttcagagccacagtgactcagggaatttccaaggcgctagggatacaatatcaccttcattggccgggcgcggtggctcacgtctgtaatcccagcactttgggaggccgaggcaggtggatcacgaggtcaggagatcgagaccatcctggctaacacagtgaaaccccgtctctactaaaaatacaaaaaatttagccgggcgtagtggtgggcgcctgtagtcccagctactcgagaggctgaggcaggagaatggcgtgaacccgggagatggagcatgcagtgagccgagattgcaccactgcactccagcctgtgcgacagagcgagactccctcaaaaaaaaaaaaaaaaaatcaccttcattgcgcccagggaccacaatcctcagggaaagtcgagaagattaatgaaacactcaaaaggcactcaaggaaattaacacaagaaactcacctcccatggaaactcaccctcttgcccatagcattattaaggatcctaaattctccccacaagataggactcagtccttatgaaatgctatatggacagccttttctcacaaacaacctcttacttgattgagaaactgccaacttggtcaaggacataacttctttggctaggtaccagcaaatcctaaagacattacccgagggatgccaccgagaaaagggaaaagcatcgttccatcccagggatctagtattagtcaagtccctcccctctacctccccatccctagatccatcgtgggaaggaccatatttggttatcctctccactccaactgcagtcaaggtgattggagtggagtcttggatccatcacacctgaatcaaaccttggatacagcctgaaaaacccgcagaatcattagcttgggaatctaagagtcagccagacaaaccttcttacacccacgagccattggaagacttatgtatcctctttcagaaggaaaattaatcagtgctcataagttctacctcagttcttgttttaaaaacagaatgtactctaacatcctaacattccttgcctttgcccaagtcttaacctttccccgctcaatgtcttcccctaatcttgagggaattattattattattattattttttttttttttttttgagacagagtctcgctctgtcgcccaggctggagtgcagtgacgtgatctcggctcactgcaagctctgccttccgggttcacaccattctcctccctcagcctcccaagtagctgggactacaggcgcccaccaccacacctggctaattttttgtatttttagtagagacggggtttcaccgtggtctcgatctgctgacctcgtgatctgccctcctcagcctcccaaagtgctgggattacaggcgtgagccaccgtgcccggcctaccttgagggaattataaacatgtcctccaggtttttatttgaagcacttcccaatcagagtaactcatcctgttgggtttgcatgaaccctaatttcccccttatatacagcagttccggcccccctcaacatatgggtggaaagctctgaggcctcatacatagctaacacttctaagggtccaggattttttcatcctagtgataggtccaatttccctgacagggctcaagcagccttaaaagcagccgccgccattctccgacaattcgctctatcagctatcccaatcataggttctgtgggcacaataacctccttctcttcgcctccactcctttgtatctcccatcaagtgttcccatgatcacaaggtgtgggacacgtggctggctgcaactatagcttgccttggatatagagttcaaatattctaattcttacagtacgactactggcaccccaatgttttgtggaaataaacatgagttccttggaaaccctatttcagtcacctatcccttaagatttaccaccccaagccaaataattcccccaccagaggccaaaacaacaagcaattactgctggggcagacttccttttgcccaggatatccccctcctgggacttggttcctctctcacaggcaaagggttaaaaaaaccccattgcttcctgcttcctgtctggggtgcgcgagtttttctttttgttgttgttgttttgttttgtttttgagatggagtctcgctctgtcgcccaggctggagtgcagtggcgcgatctccctcactgcaagctccgcctcccaggtttgcaccattctcctgcctcagcctcccgagtagctgggactacaggcgcccaccaccacacccagctaattttttgtatttttagtagagatggagtttcaccatgttagccaggatggtcttgatctcctgacctcgtgatccaccagccttggcctccgaaagtgctgggattacaggcgtgagccactgcacccagccgagagtttttcttaatgcagctagccaccggtttgccttacaggaaccccataatacgtccttggcaaattctattcagctccaactgctaggagtggcccatttgtcctgaaccctcaaatcatgggaatgagaaatgaatttagactgaccacagcccttatgagttttcagctacaggggtgtatagaaccctgataaggagttttctttgtgtgtggaagatccttctatatttgcctccccaccaactggacaggaacttgtactttagcctacatagtacctcctgtgacttattccttttcagaagaggcagtagctgtgcccattcatgctaagcttcagccgagagcaatctcactacttcctctattggctggtttaggatttactaccacctaggaagtggactcacagcctagatgaaatctctctccaacttactcaaatccaggaccaaatagactcattagcagctgtggttctccagaaccagtgagcactagatctccaatctcctcactgccgaaaggggaggaacatgcctttttctgaacaaggaatgttgtttttatgtcaataaatcaggcatagtgagagatggaattaaatgacttcaggatagagctagcagactacatggtgggacaaccgaaactacctcagggttctcacagcctgttctccactggcttcttccatttttaggtcccttccttatgattattctaggagtaacctttggcccatgtcttttcagttccttcatcctttcgtttcttcctgaatagaatcaatgaaactagaaatgttactgcagatggaacctcagatgacttcaaccagcacctattatcaaggacccctaaaccagcctgccggcccatacccggacgttgacacccaaaccacctctcacgaggaaacctcagctacagaaccccttctatgcccctattcagcaggaagcaattagagtggtcatcctcccacaccccaacagcagttgggctctcctgttgagagaggggactgaggggtggagttggcaggatttactgggcaggtttggggactttcacagaagacccctgtgactcagtgttttgagttcttaaccaatcgagtgaaggattcagaattaaccactccaggccgggcgcggtggctcacgcctgtaatcccagcactttgggaggccgaggcgggcggatcacgaggtcaggagattgagaccatcctggctaacccggtgaaaccctgcctctactaaaaatacaaaaaattggccgggtgtggtggcgggcgcctgtggtcccagctactggggaggctgaggcaggagaatggcgtgaacccgggaggcagagcttgaagtgagccgagatcgtgccattgcactgcagcctgggcgacagagcgagactctgtctcactaaaaaaaaaaaaaaaaaaaaacaaaaaaaaaaaacactccagaggaggattgaaaaaagaaccactctcaatggacaaaaagaaaggggaggggtaacatagggatatgagccctagccaccggagccagcaacggcaacccttccgggtccccttccagcatgtggaagctttcctttcgctttgttcaataaactgccctgctgctcactctcctggtccgtggactctttttgatctgtaacacacaccgcgaaggtccacagcttcattcttcaaagttagcgagaccacgaacccatcggcaagaaaaactcccaactcactaacagcctagtcccttcccccttaaaggctggtgtctgtcaccccatacctgagctggtccctcttcactaagtcaggctaccagcatcttcctgctcctccggctgggcccctggaggaggaagctttccaaagctctgtctagcccatgtatccctccagcaggaagctccaaggcctcctctgtactttgaggtcgttctggcccctgctatgctccaggctcagggctattacacaagacacccaattcaactcggtgggctgttgacaccgtccctgtcactgaatcttgtcttcacccctgtgattctctgaagagccagtgaatctctgttaatgttggtggagttccagccactgcactttttttgaggcagactcactgtggctccggctggagtgcagtggcatggtcatagctcatggcagcccccaactcccgggctcatgtaatcctcccacctcagcctcccgagtagctgggactggaggcgggagccaccatgtcgggctaattggtttttctgtagagatcgggcctccctaggttgcccaggcttacttaacactcttgaacgtcaaaacccacgctcagtacccgcttcaagtggaagtcggtgttgagatacaagcataggaacgaactcaaggctaacagctgttctgtattcagagccgcacaatcaaggaaaaacacgatcggaggcgggccctggacgggaacaagaagggtgggcttgactgggcggcccgcggtcttggttcccctttcttccttctggctggccggccgcagggtagggggtccgtggacctcccggcctgtagggggcgtcgggcgcagcggaagggcctgctccggagcctggccagggctgcgcagtcatgatcaccgagaccgcggcggagcctacggtccctgcagtgcctgctgctgaggaggccaccgaagctcggggacgcgaggagccggcgtggccctgggtgagcccaggcccaagcgggaacgggcgcggggcgggcggcgcagacccaggggcgcgggcttcatgccccagccgtgccccctgtcccgcagaaagacgccccgatccggacgctggtgcagcgcatccaccagctgcaggctgagcgcgcgcagggcttccgccgactggaggagtgagtgggggcgcggaggggctcagggttcggtcccccgcccgctccgggcgtgggcgtgttctcggcgggcgtgcctggaggaggagctgggtccttgtgtggctgcagagtcagatggggcggggatttcggggcaccgggtcctcaccttcacgaaaaaggccccacagcacgtccccactacccgacgactcactcttcgtggcttctctctcctccccaagagcaggggtgggcctgtctcgcgttcccctgcgggagtcaggaagcgtccttcctacctaccagtcctcccctctggtgtctggggacacttcctgggggcctttcaggtggttggcgccggtgcagggcctgagagcctgggggcgcggcctcagggtccccacatgccgcagaggccaccgccagtacctgcgcagcggccctgactacgacttcgcgcgctaccggagcacagtgcacggggtgacccaggccttcgccgccgcctcgcgggaggtgctggcggtggaagcagagctgggcgggcctcgcaggcagccgctgctcgccggccacgtgcgcagcctgcaggagctggagcagacgcggctgggcacggtgaggccaccaccccttccccgccgtgtctctaggaccctggccggctcctctcatgacgcacccctggttggggggtggtcccagtatcccatacacagacctcaccccttcctgtcccaccccaatcctctattaaggcttcacttggggattctcggaccttgccctctgctgttcatccccaatttttttcccaagttttgtccttattcccagagcactcccgctttctcccagctccgcctaaatgctattccaagatgcccagatcccgccccaacaatgctccacccactctggttgttccgcgtctagggtcccaccctcaacctcccgtagatacaggcgaggggggtcccaggccacgcctcctccgtattattcctccatcacagctttagttctttgcctatttctctcttgcgatccgcctgctcggccctgcaaccgtgtgtgactggaattcctaggccacgccccccatgagcgacccgtctcagcgtctctttggcctttttctttctggtgttttttttttttttttttttttttaagacaggctcttgctctcttgctctctcacccaggctagagtgcaatggcgcgatctcggctaacggcaacctccgcctcccagattcaagcgattctcctgcctcagcctcctgagtagctgggattacaggcataatttttgtattttgtattttttttagtagagacggggttgtgccatatgggcaaggctggtctcgaactcctggtctcaagcgatccgccctcttctgcttcccgaagtgctgggatttcaggcgtgagccaccgcgtccaggctttttggcctacttttatcctgggtccccgtccctgggaccatgaggcgcaacctaacccacccctacggccaatgcctggctaagacgtcactgttgttcccaggccacgcccacatcgcgctcagcactgcctctggcctgcctgctgtctcctttctgagagagcctctaaactgaatttcggactcttcctacacaaagcactgcccctcgtggttctacccgggcactgcctttctgggtgcctctgttttttcctgaacatccttggagggcagggggtgggttctgctcgtggagacatccttcgtgttgctcattcccccaccaggtggccctgctgcagttgatggagacgccagagctggcggggcaggaggacgctgtacggatgcagcagctgaaaatgaagtgagcgctgctgcccaagccgcctggctatgctcgatttgcaccagggttggcacggtcaggacgctgccagcagaggaaccctctgccagtgcacaatggtgttctcacctggtggccctcagatgtacacttccccagagggcacagccgtgaaacttcacatcagtttcgctgtgcattgctgggacactgctgtatacctcgacacatgccaatcctgcacacgtggctgtccgtggagcttggacatgccccactgagcacagaccttcagatgcctgtcctcagcccccaagcacacacactcatgtacacacacatttgacaaagtcacacttcataacctcctaatggtacacaccccaccaagatggccttttcttttcttttttttctgagatgcagtctcactctgtcaccaggctggagtgcagtggcgcgatctcagctcactgcaacctccgcctcccgggttcaagtgattcccctgcctcagcctcctgagtagctgggactacaggcgcgtgccaccacgcccagctaattttttgtattttagtagagatgggtttcaccatgttggccaggatggtctcgatctcctgacctcgtgatctgcccacctcagcctcccaaagtgctgggattacaggcgtaagccagcacgcctggtcctttattttcttttcttttttctttcttttttttgagatagagtcttgctctgtcacccaggctggagtgcagtggtgcggtcttggcttaccgtaacctctgcctcctaagtagcttggattacagatgcccgccaccatgcctggctaattcttgtatttttagtagagacggggattcgccatgttggccaggcttgttttgaactcctgacctcaggtgatctgcctgcctcagcttcccaaagtgctggattacaggcgtgagccaccatgcccagcccagatggccttttctctcagcccactgtgacctatggggccaccccttctccctagcacctaagtgttccctcttgctgctagtgctgcctggaggtttggcggcgggcaggagggcctggggctcaccacagccacagccctcttgcagcttcgcggcagcagctaattcaccccatctgggttttatttatagttcccatccgctcttgtagggtaattaaaaccatggaggcgatcagcgaggttctccaggaccttaggtttgatgcggaatctgccgagtgatggcggctccccagggatgcgccgagggagatgggaaacggggcggatggcgcccagcccagccctaactgccagctggctggggttgcgccccactgcgctgctgaccttcctgcagttccagacacctcccacaataaagagctcctcctctgtagccgctctgccatctctgtgtacaagggtgctgcagccagtgtgcctagggagggggcccccacagggccagggattgtgggtagaagactcccaccctccctagaaactgaggtttttttgcttgagacagggtcttgctgtgtcacccagactggagtgcagtggcgagatcgtggctcactgcagccttgacttccccaggctcaagcagtcctcctgcctcagcctcccaagtagctgggactacaggcacatgccaccacaagcccagttaattttttttttttttgagatagagttttgctctttttgcccaggctggagtacaatggtacgatctcggctcactgcaatctgcacctcctgggttcaagtgattcgcctgcctcagcctcctgagtagttgggatcacaggcatgcaccaccacgcccagctaattttgtatttttagtagagacggggtttctccatgttggtcaggctggtcttgaactcctgacctcatgtggtccacccatgtcaacctcccaaagtggcgggattacaggcgtgagccatggcgcctggccaattttttgcttttagtagagatgaggtctccctttgttgcccaggctggtccccaactcctggccttgagcagtgctcccagcttggcctcctaaagttctgggattacaggcatgagcctttgcagccagccagctcaggtattttgaatcacattctccaaggagttcagaatcagaccttgcaaatactggatagacagtctgaagtcctgggaggtgaaaattctaatctcaaagggtcattaagacgcctcacattcccctcaaatctcacagcccccaccccaggccaggcaggccccaaactcaccttcacaatcacagcacctaaatagctcatttatttaaaaggactcttttggaggggccctaggtaatggggagtaatgactccccttctcacccccagccctggcaggggttctaggcaactcaaccaaccctcacacacacacacacacccactggggtgcacccaaaggtggcctcacgtgggagtcagagctgttatggccgttggagctcaggggccaccccagctcctgctgagggtggctcaggtgccctgaagtgagggtacagaggtggccccagtttgggttcggcctctgcgtctccacgtggcagggagggtggcctgagcccctacagcttatctggcaggacctgcaggcagaggggaagccaagctaagcagggagtccaggagagggccgcaccacagagccactgaaggaggcttcattcgtgtcctgtccccaccgcttctggctgtgtgactttgggcagggtcctgcccctctccgggccttggcgaggctatctgagctgcaggtaaagcacttggcgcggagccagtatgcagtaggcgcccatgcgtgctaactagggtgagtatgttcattcatttcggaggagattccacttcggacattttcagggcattgaatgttcttaggctaaaggagacaatgccagttatacagtaagtgctaagtaaatgctgatgaataacaaaggaagaggacggattccatctcagcgactctaaggctggggttgggaggcgtgggggtgtgaacaagacctgcagccaccggaaggggccctccccttgctccctcccgcccacccattcaggcccaccttacctctcgccgtgccccgtctgcccgagggcaggatcccctcgtcctgtgcttggaaggaaggcagaggtgtcgtgggggctgcagacctgcgtccacagcctgctgtcttccccctcccctgttttctgggcccccccagctccctgtccccacccccacgcccgagggtccctccttcctacctggttgcgggtcttgtgcgacttctgcatccaggctcgccactggtcgtagaggcggaagctgaggttggagcagtacgcgtgcttcttgagccagcccaggaactgcttgagctcgcgccgcaccggccccgagctcggctctccgccccgcggttcgcacgccccgccgcccgggcccgggcgctctggtggtgggcggagcggcagtgtcagagcgcgcccggcagggggtgcgcgcgggcaggagaggggagaccccggcgcggcgggaccatgctcccctcggggaacctccctccccgtttctcaaggaccgagtcctccccgcggccctgcacagcagcccagctgcgcccctggcccggctgcgcccctggggaggtgggggggagggggaaggaaggggctcctcctccacatctcctccaggaacccgattcctgtggcctgagccaggtgcgagtggagtggggggaggggagaatgagagaggccagagccggggggatgagacatagagatagacagacagagcagggggccgaaaaagagaaagggagaaagacgcacggatgagagagccggggccagggatggagagatggagacgcagggtgggtgaaagccaagggtgtcagcccaggaggaaagggcctgatcagggtaggacagaaaccctggggacatagggacaaagagatcgagacagagacacagaggaagagtgacagatgaagggagaccgagtgcaagatgaccccatgggactgtccccagcatgggcccatgggacagggagtgggccaggagggccaggtgggaggcctgcctgtcggtccagctgccggctgcagccagcccccagcaggccggcggataaggacatcggcctcacgtcataaataaagccggggacccgctgacaggccctggcacggccccggcccccgccgcccctgctggccttccccggcctccccagcctcccctgcggacgcagcggcctgctggctcctgtgcaagaatcgcaggtgccgggcacgagcaggggccaaggctcaggcccctcccggctgcgcttgctcccgcccacccctgaacctggaggggcccaggataggggctggggagctggctggagcctgactctacccctccctagctctgggaccctctctgggcctcagtttccctatcatctcacgagccagagtgagcttggtcttcccggtgaactaagtttagacctgtgtgacctcctagagcctcagtgtcctcacctgagaaaaagcggcctcccttgcagtgaaaccctggggggatgggacaataagtacctccatgccaactgcctgcaaacacttaggtggcacccaccatgtgggcacttgccacaaattatgtcatccaaccctcataacagcccaaggcaagtgggattctcgaccccaccttccagatggggaaacggaggccagacattccaagtaacagctttcgtttcatttcacaaaagagagactagaggcctgtggacccggagaaatcccagacagcaagaggaagcagacctaggcacctaatcattcccatccccctgccttgatcagaaggagaaattgaggcccatcaaagtgggagttggcagcccattggccttagaagcaggggtctcaaactcactggccccctcttaggagggagtctgagtggccaaaacagaccagatggggatgggcaaatggagagtgagggtcctgagaaggggagaccactgctggtgggggctgtaggccatgctgttacattttctagataatttatttttctagggaatctaggatatttgtgtaaaaacttcctgggtttaaaatttctactagttggtcaaactttttttttgttttccaaacaacaggccaaagaaaatagatccaagggccacattcagctctgggggggccaccagtttgagacttctactctcttggagacaatcaggaaacaggctgggcatggtgtctcacacctgtaatcccagcactttgggaggccgaaatgggcagatcacccgaggtcaggagttcgagaccagcctggccaacatggtgaaatcctgtctctactaaaaaatacaaaaattagctgtgcatgttggcgcgtgcctgtagtcccagctacttgggaggctcaggtaggagaatcgcttgaaaccgggaggcagaggttgcagtgagtgcagatcacaccactatgcgacagaatgaggccgtgtctcaaaagaaaaaaaaaagaaaagaaaacaaggaaacagaggctctagctggtttcggactggccgctggatcacccagccctaggagggtgctcaccactgcggggagtggaggcggctgtggggtggctccactcactccagatcccggctttcttggagccatagatgccaaaggggttgcagcgcacttgcacgaagtacacggtgccgggtttcaggccggccaggcggcaggaggtctggttgctcacatcgtccaccacctggacagtgaggacaaggtcagagtagagggcggggcctagcaggagcgggggcggggcctggaaggaacaggggcggagtcagggaaggggagggtcaccttccagtccacactgtcctccactcggtagcggatctggtatttggcttgaaagaggaaatccttgagggcgggtggcgacacccagcgcacgctcagctggtcctccaggcccccgacgcggctcacgtgcacgtcgggcggggggtccgtggtcactgcggggcagaggagggaccctctcagcctgggactgtctgggtttaactccccccagcagtgtggcccagggcacttggcctagatggaacctgcctctgttttcctcctcttccctctgcccccacccccaggactggtggattacacgatatataatattggagaaacactcagcacctaattaatgttagctgttatcaccattattatctgtgacgggagaaacataatcctatcttcaactgactatgggaaagcagccattgcggggttgatgatattattattatcatgcttaggaggccaggggctgtcaggccgtcagccttctgggaacctccctgccaccccctccccactcacacctcccttccactcttttttttttttttttgagacggagtctcgctctgtcgcccaggctggagtgcagtggcgggatctcggctcactgcaagctccgcctcccgggttcacgccattctcctgcctcagcctcccaagtagctgggactacaggcgcccgccactacgcccggctaaattgtttgtatttttagtagagacggggtttcaccgttttttagccgggatggtctcgatctcctgacctcgtgatccgcccgcctcggcctcccaaagtgctgggattacaggtgtgagccaccgcgcccggccctcccttccactcttactgaaatctttgatgtgacattttgctgggtgcagagaagcaactgaggcttagaactttcccactgtagcgttaggatgtggggaagagtgaggcaggctgcgggggcagggatgggggctacaacccaggcgtatgtgtgtgttggggggttctgaggatccttctgggggcccctgagggcagcagggtgagctggcctctccccctgaggccttggtgaggggcctaaagggttaaggcacaggcctgcttggggctgagaaacaccctaattagattaggctcaattctgctcacagatcatccatttcctgcctcccgccctgcgccccccagctccaggcctcggcttcctggggcgcctcccgacctgggcgccccctcccctctccccagggccccctcctgcacacctgggctgccgagggggtggtggccaggccaggtgttctctgtggagtgggggtatcctggctgtttctgggggctgcggactgatgagcggatgctcagctacttacctaccttccctctgaccagcagggacaacccgggagttgccgggctggggaggggcaggtgggaccctaggaaaaatgagaaggtgcaggggacccctcgggatgctcggtgggtggggctggtgccgagggaggggcctagcagacactgggggctcacccacatccaggatatccagcgtgagtacatcggagcgggcagagcccaggcggttggtggcctccacccagatctcatagggcgtaaagagagccaggtccttggggatgtggcaggagtggggccccactgtgtggtactcctcacatgtgttgtcctggccataccacctgcggggatgggagggcgacaggacgcatgagggttccttgtggcccccagacctcaccatggcagcctcagggtgcagacaacacatgggggctcagagagggtccgcgttggtcaaggtcacgcagccagcctgggacacacacatcgccctcaggccaccaccaacctaagcttgtacttgagggagtagttggtgtggaggaaggtctccccgtgggcccctggcgtccagcggcaggtcaagtccttcatgttcttggaccagcagctgatgttgacgggtttctctgggggcactgggagaaggggagggtgcaggaagcaggctgagggtctggactagctgagcctcggctgaggggttgctgcccacccaccaggcccccaccttggagtggaaggagggcagacaggacagtctcagccctgtgctgagaaatgccagcacagttggtgtgacaactgcaagggctcttgagaggctggtgactcgatctccgggttctttttcttttttcgaggcaaagtctcgctctgtcccccaggctggagtgcaatggtgccatctcagctcactgcaacttccgcctcctgggttcaagcaattctcctgtctcagcctcccaagtagctgggattacaggtgcctgtcagcacgcctggctaagtattgtatttttagtagagatggggtttcgccatgtaggccagcctggcctcgaactcctggcttcaagtgatccacccacctcagcctcccaaagtgctgggcttacagacatgagccaccttgcccgaccgggtctccaggttctcattcccacctgaaagacctgcatagccatgccagtgtgcccacagctcatccccaggccagaaggcccacaattcatgcctcactccagagggagatgccgctcccaagagctacccctggggtgtcctgggtgccaacttacggccaacatagaggcaggagccagccaggatgctgccgtcacgggcgtggcacacgaggttgtcccccgaccgctgcctggacccattgaggttggccagggccagagccaaggtggaggcgttgagtacacgggagagctcagggggcaggcggcgcccgttgagggtccagtagaggccctcggcggtggctcctggtgggtctccgtgcactgagcaggtggccagcagggaggagccgatgagaagcgtgggatcctggggactgatcacagctgtgtctggggtcaaagaggaacacgtgtcaggccagggcggggaccctccaagcccccaaccatgccaggacctccagggttcatggtggtcctgaaaagacgctgttaatgattgtcccccattttacagatagggaaggtagagatcagttgggttaaatgcccagggcaacactggtggccaaactgacagacctggagttgtccaggtctgtctgactccaacactggatccttccaaaactcttcatcactgacatgcttaaggttctctgaggggtcacacaactcgggcatagaggctcattcggatccaagtgactcttgcttagcacatcgttatgacaaacactatgctttgctttttttttttgagacggagtctcgctctgtcgcccaggctggagtgcagtggcacgatctcggctcactgcaacctccgcctcccgggtccaagcaattcttctgcctcagcctcccgagtagctgggacttcaggtgtgcaccaccatgcctgactaacttttgtatttttttttttttgagacgcagtcttgctctgtcgcccaggctggagtgcagtggcacgatctcggctcactgcaagctccgcctcccgggatcatgccattctcctgcctcagcctcccaagtagctaggactacgcgcccgccaccacgcctggctaattttttgtatttttagtagagacggggtttcagcatgttagccaggatggtctcgatctcctgacctcatgatccatccgtatgggcctcccaaagtgctgggattacaggcgtgagccactgcgcctggccaagttttgtatttttagtagagacggggtttcaccatattggccaggctggtcttgaactcctgacctcgtgatccacctccctcggcctctcaaagtgctgggattacaggagtgagccaatacacccaggcatgctttgctttttatttttttagcgacagggtctcactctgttggccaggctggagtgcagtggcacgatcatagctcactgcagcctcgatctcctgggttcaagtgatcctccctcatctcagctcccaagtagctgggactacaggtgtgcaccaccacacctggctgatttttaaatatttttttagagatgaggtctcgctagtttgctcaggccggtcttgaactcctggcctcaagcgatcctcccaccttggcctcccaaagtcctgggatcacaggcatgagcttcggtgcctagccttctttatttttcattctcattttgtttttcttttttggcaactagaaacaaaagattgtgggttcttcctgtgatgctcccagagcctcacacatagtaggtgtttctgtgggggaagggcactgcttaaaatgaaagccctgacccttacttgaatcattaagagcaccatgttttttttttttttgagacggagttttgctcttgttgcccaggctggagtgcaatggcacgatctcggctcaccgcaatctccgcctcccaggttcaagtgattctcctgcgtcagcctcccgagtagctgggattacaggcacacatcaccgtgcccggctaatttttgtatttttagtagagatgtggtttcaccgtgctggtcaggctggtttcgaactcctgaccttgtgatccgcctgcctcagcctcccaaagtgctgggattacaggggtgaaccaccgcgcccagcctgtatttttagtagagtccaagaatcgccatgttggccaggctggtctcgaactcctgacatcaagtgatccactcgcctcagcctcccgaagtgctgggatgacaggcgtgagtcattgcgcctggcctaacagcaccatttattgagcacttgttgtgttctgaatactgggctaagactacctacattttctcggccaatcctgcttatatgttaaagatgaaaaaactccggctctgaaagatggagtttccttgctggaatgagggaaggccatactagttaggcccagattttctggtctccaaagttctgttccacactgcctacctctggaactaaaggcagccctggcaaactgcacgtccccaactcccatccaaagggacttgacatcatcgctgtttccctccactcagttttcctcatctgcaaagtgagaacgagaaagctctttgtctcctggggtattgtgaaagtcagaggggaaaggacttcctgaaccaggttgtgtgtgagtcaggtactaggcacaggaaacttggggacgcccatgggtggttgatgcctctctctcctgctggccatcagggcagcccaggagttccccttctggagaccagaaccttgtccatagggaaaccaaggcccagaggaggagggggtgcacaggccaacctcccaatgcctctctgagtctcagtttccccatctggaaagtggacatcatggcgtcaatgtcatggggttggctgggtgcggtggctcatgcctgtaatcccagcactttgagaggctgaggtgggaggatcacgtgaggtcaagagtttgagacagcctgggcaacatggtgaaaccctgtctctaccaaaaatacaaaaattagccaggtggggagggggtggtggccccatgcctgtggtcttagctacttgggaggctgaggcaggaggatcgctggagcccgggaagttgaggctgcagtgagccatgactgcaccactgcactccagcctgggtgacagtgagaccctgtctcaaaaaagaaataaaaaatttagatttaaatttataaaaaccaacaaaacaaacctcatgaggttgtttgagaggagtgaaaatattgttggagacaatattttcccatgagatctttaaaccaagttgacctggactcgaatgcccccagcctgactcagtgttctacttttttttttttttgagacagagtctcactctgtcacccaggctggagtgcagtggcacaatctcggctcaccataacctccacacccagctaatttttgtatttttaggagagacggagtttcgccatgttggccaggctggtctcgaactcttgacctccagtgatccacccgccttggcctcccaaagtgctgggatgacaggcgtgagccactgcacccggcctcagtgttttacttctttgagcctctggaaaggggcttctcgttccacacagagtggttgtaaagactcatccacgcctttgttcgttcacgcgttcatctattcattcacagggtacctatagtgtgtccggatctgtgggcactggggtgatgcccaagacacacaaaagtcctgcccttgtgggcatcaaatccaaggaagcagcaggaaaaaggaataaataaatatctaagacaataactaggggagaaagtaaagcaggggctggaggaagacagagcagcggcagaagcttgggaggcctgtctggggaggtgacctttgagcagagacctgaataaagtaagagaagtagctgtgacattatctaacagagcatgtccaggcagtgggagctgcaagtgccaaggtcctggggcagaagcggtgggaaatgaggtttgagaggtcagagaccctgacctgcagggaggagggattccagggttctcagccggggagggagggatgcggtgagatatgcgttaaaaggactccccaggcggctggaagaagggactgcaggaggcaggggcagcccagcttcgcagagatggcagccaaggacagggtgatcctggcccccagggaggccccctgaatgccagcgctgccctgcacttgccctcactgccccagatgggcgaggtggggtggacacggttcttgggccggccctgatgattttccggggcaaacttggctcgagggctctgtctcgctggagcctggaatcgcagttgcgcttggggcttggcccagggctcgccggaggtctccgcgtccgtgcgaaggagccggctgagcgggccagagccgaggaggcgggggcggccgaggggggcggggggctgggggccaggggaccgccctggaggtcccaggcagccagccgcccgctaattcggaattccttttgcatgaactcgggtgtgccagcgtctctgccccggcccacccaccgcttcctgcctgggcccccccaacagagtgggaggcacggccaggcctgcccagaccccaggcccctctcagcccttctagagtgggtctcactcctcctgcccccaccacccgccagcttggcctgggcaggaaggggctctctggggggtcctggctggggggcgctgcccctctgccacacccgcctggcctgggccggcgtggctcacttgccagcagctgcagctgccctcccggggctgggcgggggacaccgggcggcgacgggttgtagggggaaggcaaggccaggcgggcctggacagaccaatctcccacccccttagccccagccggtaaggtcagaaggacactttctcctcccgggatatgggcgcaacaccagtgggagaacctggccaattgacttcccctctccagttctcaattttctcctccataaaatgggaggagaaatacgttctacttgctggggagatcaatgagatgtgattgcaatccaatgtccagagggctcagaagcctgaagcccccaggagctgcaaagatgacagcccctcccagctctggggtcccggctgactaggcactccctccaggcctccacaaacaatgggctaaggcgctggggacagagatgcacgcactccaggccaggcaggggagcagctgggaacagcccactgagccggagttggtgggggcttggcttggtttggagggcctcctagggctccccaaagcagatccctaggttgggcttttgaacagctcccttttcactccctgcctcccctcctttcccgcagagctggggcctttaaaagttttttctctcctcttttcccaatctggagccactgccgttattaaaaaggaacaccatgtgttttaaaagggaaaagtgtgagattctctgcaagcagggcggaagggtggcctccatcccagggtccccacgggggtccccatctcccgtcccgctggtacctgcagacactttacgacccacccgcctgctggtcaggtgctaagacacaccgtaagtagaaacatattgccgaggtgtgagaatcttttatttaatttcttccccccttaaaggaaaaaacacacttacagtgcccccccaccccctacaccttcgcctgctgctctactggctgaaaacaaagcttggcgctcacagtggcactcacaggcgctgcccaccgcctggcagagccgtcaggggccctgggagggcccgaggtagcccctcacctgaaagccaggggagagccaggctttcagcaagtgcccctagaagatgcccggaccctgccccttcccggaggagccctacaggcagcccgcaaacagcccagcacagggtggatgagcctgggagcagtgtgtgcccggcgacccccggggtggcccgtgcgcctggatggggtgcgtggagtgactgaacatctggggcgagtggtgcctgcctctgtgcccctgggtcgcctcccctgtgggatgtgtgtgaccgtgaatgtgtgtgtcggggatggaatgtgtgtgcgtccgcgatggtgcgcgaatgtgcacctgggatgcagtgtgcgcgagtttgagggcgagggtgacgggccacaagccagtgtgattctttgtgtgtctctgggtgtgtcccagagcgggtctgcatacggagacgtatccttgcgggggtgttccttggatggggggccccagagtgcctgaggccagaagtccctccagggcaggggtcttggcccgtagggcagcgggttcccagtgggccccctcaaagtttgggcccgctggtgcccggactcactggctcccgctccctctccctctcacccactcgctcacaaagattcctctcgctggaggctctccgcccgacgcagcctggctgaaaacggttctaagcgccgccggtggcggggactccgcggacccccgtgcgccgggtcccgcagggggagggcggtggcgccggcccgtggagacacaagtcccccgggaccccgggctgcgcgccaggcggccagagcggcccccctgcagccccgccctccccgtggggctcatccctccgcctgggggggcccgctgggggcccgcacccagcgcgccaaccgcgtgcgcccccgcctgggagcggtgccctgcagtcccaggggcccagagtccaccgaagcagacgcgtgcgcccgccacgtcctggcatgcagagggtctcaggccgcgatccccccagcccccgggggcctggcctggcgccctcggcccagctgcccaggtaacagggcctcgggcgcggaagcaggactctctggacagtggactgcggcgccgtgtgccccgcaggtgagggcgccccgagggctgcgccgggggcgccttcctttgttccccggccgtccaggtggcgcccgcgccccctccccccgcggctgcccccggggcgcccgccctctgctctggcaggggggaaggagtggggcgccgggtactcacgggctcctgatccggctcgcggcgccccgaggacgcagagcagcagcagcaggggcagcaacggcggcggccgccgcgcggattgggcggcggggccccggcggccggcgggcatggggccggcgctgccgggggcgcgcggcgggctgcggctcggcggcggtggcgcagggcgcgggacgcaggccgggcgcgggagggcgcgggccaggccgcccgcacgtcgctgggcgcggacgcggaggccggagcaagtctgagcagccgaattgacaaggcgctaatgcgccgctggccccgcccggccccgcccccggcccggcccggccccgggggggcggcgggccccgcaccggcctccccgccgcccgcccgcccgcgggcaccgcgcgccccgcccgtcccgcctccgccccaccgagaaccgcgcgcgccctatcccgcggcccaaagccccctaactcaacccctaccggcccaggacctccctctccaaccctgccagctccaggcttcccacccccagtctgggacccggcacccccaatcccgtttccataaccctgcccacttccctgcaccctcctctcagcccagtgcctcttcagtggcccctttggtccccaaccctgccccactcctccattcccccttccacggcccaatcttctgtctcggcccccaccccagctctggccccgccccccccaccgagcggtccttgagtcccgcctacccccatctccagcccctcagccttcccaggggcctaaaagtcacccccagccccacgccctcggcgcgcgggttccagccctcccacctcatcctgcctcttttcgattctccgcgagtagcctcggccccaggctttgctggaagaaaggagaaaaagcaggaaggcacggagtccctcgccttcgccctggctgcgctgtccccttcgcgcgcgggatgggtttgaggttgctctgggcgccccgggggcctcgggagggagctcctgcgtgggcagacggggagatgtagtcccctgtgggagccgggacccaggcctgcgcgggaactgggtcccgcaccgcagtaagagggattcccaggaggagagcggtaagaagctctttccccgggacctattcacaccccgccacggaaaaatccactcagcggcccgcgggtggggtgcgccacgcggtgagtaatcgcttcggcggccaccgcccgccgactccaggtaacgccggctgcccggagcgacgcatagtttgtcttccttcttttgcgcaaagagccttctccgtgttattatttttggccattgctcgagtttcgggacccctcccggtccgggcgtctcatctccctcctcccggtccccacccgatgcgggcgcccaggaataaagggttcctggcctccaaggctgctgcggatgggggtgcctgaaatgagagttggggggtgcaattacccacttttggtcgcagccccgcccccagctgcagcgcccagggaagggaacggctccaagtccccttttccaggagtcccttagaggcctggattctctctcctggtccccaaccagccaagggggtaaaagtgtctgaggggggctcaggagcccccatttgtctgcccaagactgaagccccaccctctcctacttaaatctccagttcagactccagactgtcaaaaaacaagattgggggatgggagcctataggggcccagggcgcccctgctccatctgaattctggatggagaagacagacaaggagagacgctgccatttacttcgggaaaccaggccttttgtgcctcagtttcttcctctgcacagtgggcaccacccagtctaggagcttctgtgggaagacgcagggcagcagaagtctctacaatccaagcccttagcacagcactggaggatatcctggagcagaggtgacccccagccctgcttgtcccctctgaaacatggagccatagtcccacctgccaggggacccagagggttaagtggaggtggcagtccttggctggaattgagtttttaggatactcaccactactcccccatggctcctgtctgcagatgctctctgtgtggatagagacgcctcactccctcctgggaggacttcaggcttctggagcaaaaccttgattttttcctccctccatttctgcttctcttccagtcattttggttttgggaaagggctctcccatccatccaggtgctcaggccagagacctggaagcgcacgtgacaactctctcctttgctcatccctcatgtccaattcatcagcaaatcctgttggctctgattctaaaacacatctccattctgagatgctgacccctttttcccaccccattcagatccaggccccacggtctccctcagggatgcttcccggcctcctccagggcctccctgataacccttctgcctttctcggcacaccaggcagagggagcttttaaaagaagaaaaagcagatctttgtcctgccaccctctcgccatcctctcccctcctcttcttccctctcctcttccccctcctctccctcattccgccccagccactggagccctgtttcccaaaacataccaggcttgttactatagaagggcctctgcgtgttggctgttccctctgctggaatgctgttccccacatcttccccagttggccctttctcttccatcacttcacaggattagtgccacctcctcagagaggccctccacccttcccccagcactctccctctccttcactttgttttattgtttttgaaacacaactcttccaaccatttcatttcttgtgcaactgattttctttagactgtgggcagcctcagcccctttggaccccagtggtgggcccagtgagggctgaaagcgaagcactcactaaatatttgtaaaagtaaaggatggagaactcttactccctccaagtagcaagaaaactcagtcctagcaagtcatgctgcctggggtcctagcctggcccacactctgtgtcttgctgtgtgaccctagccagtagacatccctctcttgttcttaccaacagaagggaaggaccattttccaatcctgcccagccccaccctggagtgtgacttctgcccttgggtgatctttaccccacacctttgacttcagggaaagggaattgaccccagagtgcatccttcccggcccttagggcccccagaagtttaaccctttactccccagttccattatctccttgaggacaaaagggagctagcgtcaatggaacttctggcaaatattgacccaagtccttgaagttggctgggaatgtgtaaggggcagaaggagggagggcctccccttgggcagagggagggcctccccttgggctgggggagggacccctccttagtcctgcaccctccactccaaggtcacctctggatgagaggtattaggttggggggggggcctccatccccagctccctcgtgattccagggcactgagggtgcaccagggagggggcagtggaaatggcaccttcagggtcctgtggggacccacaaccactgggagtgaggaaggctgagagctgtctctcccattctgaaagccccgtgctcagggctccccagtatgggattagctacctggtgttccaggcaggtgctttcaggaattaaggggcagtgagggtctggacacctggttcagggtctgtggcacaggaaagtggggcccgtgtgtacctaggctttataatttctgccctggaggctgagcctggggagaagcaatgcctgggtgctcagtgtaatgcacactggacttcaggcactggaggcgggacctggggagttgcagacctgcctaggggacctgcctgggaagttgcaggcctgccccagggaggccagtttccctgcccgtctgtaccctgagaagcctctgaagtctgggtcccaggaggcaccagctgctttagggggacagccacatccctccgtcctcccccaacaaccctcagcaaccaccaccggcgccatggtgctctgcctcctccctggcctgtaccctgcttggaggtgggggtcagcagggtcgtggtgagggcggcaagggacaaagggtgcttgtccgctgcccgccttgacctcggctgctgtggcttcccggacgcctggcctgccgctgattcacgcccaggccggcctcagcgccccccgcctgccgcccccagccaggccgccccggggggtaggaagtgggggggggggcgagggcggcgccgagtcaactttccctcttaagccccgaaggaatgtcggcggatttcctgaaacccgaccctggccgcccgccggccctcccgcccctcacctggaccggctcccccgggaacagcaggaggggcgcgggggctcaccttgggggccggggtcaagtcctctttccgctcacccccccagcggcctagtgcagcggaaagggggctgggtgtgcggcaatcagcctctttcccttctcccctcaggcgacctgggtgatcgacccactcctccagcctcagtttctccttctgcaaaagggcgcggggtgtccctcctccctgatgcgttttaagcaatgcccaaaggtcacctcccatcattggcagggctctgccggcttttctttgcttctctccctgtcacctggacagaaccactttgcagtctgagcatcagtttcctcacccatataaaagggcaacgctaccggtacctgtcttatacggttgttgcaagaaaaagtgtttcgttggaatgaatgaaagacagtaattgtggaggggttaggcgcgcgcgggcctctggaattagcatgtgtgggcttgaatcctgactttgccaacgcgtcccggagcctaagtttcccacctgtgaaatgggggacagtattggtcataacgcacagggctgtttcccaaggtgcgggcctggcgcgcgggtgggttagaagcggaattctcctgctggattctggcgcaaactgcgggctggaggccctcgccgccgggtcgcagcggcctagcatgggaggggaggggaggggcggggcggggcgggggaggggccgcaccgggatccagatgttcggggtccgccaggcacagccgcgcctgattaagccacgtgggggccggccgggggccgctgagatgaaagcgcggccgcaggccagagtagggggtgcgccgggcccccacccgggacaccctcttcccaggccgaaacctgagccgccctctaacccgcagaccctgcgaggctgccgccccgtctgcgggggcggagcgtaggtgggggacctgcgggctgctgcgcggcgctgcaggcacctgcgccaggcatgccagcgaaagcgggggcatctttgcagaggatccgggtttagaggggcgtccccactcccttatctggcggagaggaagctgggggtaccctctaaccgagattcggctcctggggctacagtccatcgccctggggtgtgatggttatggaagtcagaagtgtcgctatttgccccgttttcccatgagaattagacatgtcagcatcaccccctccccttgctcctgagcatacctctgtgtcccctcccactaagccccagcccaggggtctccagccttggggagacagggccagattccctaggtcagtggatcagggctgggccagagggaggcgaggctgaaggagcaagggaggggctcagagggcttcccggaggaggcaaactgcgcgcaagttgtctcctttctaacctgggtgtcaaaagagaagatgccaggactcagctgccgggtcctgcggctctcaccttcctccctctccgttccctggttggactccagccccatcgccctccctcctcctgcaacaagctctttctctcaggatcctcgctgatccttgtagcctggacacccctttctcctctctcccgcgtggtcggctcacacgtcgcctcctccgccaagctctccgctctcctcgacacccctggggaatagtcccctccatcccatccccctatatatttccttttggccccaagcgccagcagagatcccccgcccgtgggcaccagggaggtgtcctgggacccccgcgatgggatagacggtgggggccgcgatgcacctgccccgcccgacccgcacgcctcgggtgccgcagcgcagctaccccgcccgctctccgcatctcccaccccccgcttcccaggctgcctcgctcgggtgacgtcagcgccccggtccccgccgcagccgctgcatcctccgtgcccggcctgagctggagtcccccgcgccccccgcgttccgcccggccatggctgcggtggcgctgatgccaccgccgctgctgctgctgctgctgttggcgtcgccgcccgccgcctccgcgccgtccgcccgcgatcccttcgccccccagctcggggacacgcagaactgccagctgcggtgccgcgaccgcgacctcggcccgcagccctcgcaggtgaggcgcgtgcggtgccaggtgccagcgggggacgcgggatctctccgaaggaggaggcgttgggatgggcttctcttggatgacagcaggagactttggtgggggtgtccgtggggaggtgggggtcgggaatggggagatctctccagtagttgacgggctggggttccctctgatgggggagtgcttggggatgcaggtccttgcgataaggggccgataccacctcccgggctccttccgcactctgctgggtaaggaccctctagcacccaacccccagctccctcaggcctgatggtccccccacctcattcctcctcctccacatcgtgttccctccccactcagagctaccagcccctactcataccaccactccccaggattcaagcctgatctgcgtgtgaccaaaaccccctcctctgagcctccccctcctcctccaggtctgagaatccttctccatgtctcccctcctccctggaacctagtggggggaaggctcatttctctccaccttcactgtccatttctcttctcaagctccctccccatctccctcctcagagctaagagcccccactaatatttgtagcctctcccaacttcatctccatctggctagatgtcgtggggagcggggaagcctttccctgcctctgctgaatgctccggtccccccaccctcctcctgcccctccccatggcctgagccccctgtcctcccctcccccaggcggggctggagggcgcctccgagtctccctatgacagagccgttctgatcagcgcttgcgagcgtggctgccgcctcttctccatctgccgatttgtggccagaagctccaagcccaatgccacccaaactgagtgtgaagcaggtgagggcccgccggcagggtgggccagcgtggggagaggtggcctgggaagggccgtccccagtcacccgctcccacctcccacagcctgcgtggaagcctatgtgaaggaggcagagcagcaggcctgtagccacggctgctggagccagcccgcggagcctgagccggagcagaaggtgggcctcccactgcggcctggggtcccttttcccaatacccccaccctcttcaccccgtgggaaatcttcattcacgtgcagaggctctgccagactctgcgttctataccaggcctgcagggcaacctccatccagccccgtcatgtctccagccttagttacatgcaacaacgccccccatgccccaccaccttttcaggaataagtggcagaaaacagccatcatttatcaaacatctgtcctggttcgggcctgacttcaacctgtcccaaatgtttttgtgtcacttggaggcacaaaggacaatgtcacccccatttagtgcccagggggcaacctcccaggtcatacacagggctgtgcaaggggcgagatttgaagccaccagagctgtggccactcctcacctcactcctcttaggcgcccccagagctgccaggtgctggtctaagcccttcccctgtgatgagctggtggtcactgtcacctggaggggctcagaactgcggctcagggtagagcaggcttgcctcgcaagcacgcacacactgccttatgggagaaataataacggttcatctattgtagtccaagcaatgctgcatcatggggaaactgaggcacagaaaatcatgtagcatagccagagacctaggggctgggactccccagaaagccctttccccacttcccccattttcctccaccccttcccagctttcactgctgttcagaaaagctcactgcactgtcagcccttccaattcagagctccctcttatttatttatttattttttgagatgaagtcttgctctgttgcctagcctggagtgcagtggtacaatcttggctcactgcagcctccgcctcccgggttcaagtggttctcctgcctcagcctcctttgtaggtgagattacaggcaccccccactacaatcggctaatttttgtatttttaggagagacagggtttcatcatgttggccaggctgatcttgaactcctgacctcaagtgatcttcccacgtcggcctcccaaagtgctgggattacaggcatgagccaccatggccggccatcagacctccgtcttgacgctgtcaaaataagaataatgaggatgatgatatttttagtaatagggactactacgcattaagtgcctgtgccgtgccaggcacctggcaggcatcctctagttgaaatttcatggctactccatgaaggaagagaacgatacccattttagggctcagagagcacaatccacttccctaagggtacacaggaagccaactgccacgctgagatctgtgttcactataagaagtcctattggcccaaatcacttagccacatccaatccaagtgaattctcctagctcctctcctgttagtttatttattcatttatttatttgagatggagtctcactctttcacccaggctagagttcagtggtgtgatcttggctcactgcaacctctgcctcctgggttcaagcaaatctcctgcctcagcctctggagtagctgagattccaggcgtgcgccatcatgcctggctaatttttgtatttttagtagagacagggtttcacgatgttgtccaggctggtctcaaacttctggcctcaagtgatcggcctgcctcagccttccaaagtgttgggattacaggcgtgagccaccacatcctgccccctcccattcattggttaatgccctatttcggtgccatctttgtgtcttggaccttttttcaccagagaaaggtcctggaggctccaagtggggccctctccctcttggacttgttttccaccctctgcaatgaccttgtcaactcagcccagggatttgtctcctccacctggacatactacttgcagactgacaatgggaaagtggtggtgtttcaggtgagacctctgacaggggccacgccagagtggcagatgggtgggcagggtaagaagatgggatgcattggctcttagctcatgagatgcaaagtccacagtgggcgagcttcaggcacagctggatccaggggctcagtgtctcactccatgccttgactctgctttcttttgtggtggcttcattcccaggcatttacttcttcttggcagtaaggtggatgccagaggctctaggttacaaacgctgtggtttttttttgttgttgttgttgttgttttgagatggactcccattcttgttgcccaagatggagtgcaatggcatgatcttagctcactgcaacctccacctcccaggttcaagtgattctcctgcttcagcctcctgagtagctgggattacaggcggccaccaccacacccacctaatttttgtatttttagtggagacggggtttcgccatgttggccaggctggtctcgaactcctgacctcaggtgtttcacctgcctcggcctcccaaagtgctgggattacaggcatgagccactgccccggctccctctggggttttaactgagctgggatttactctgattggccctggctggatcatatgaccatctctcaggcaattcactggcttggtctggatcatgttcctacttctggagctaaaggatggggttaaggcaaatggaggagcccatgaaagcagaaaacaacatccctgacatcaagcccacccctgatacccaggggaactgggtatcagctgggcgtgggacatggcagtcacagagggcctgcctgggcccaggggtgctgttctcacaagcctctctgtgctgtcttgttcctggcccagactcagcccatagtggagagcctcggcttccaggggggccgtctgcagcgcgtggaggtgacctggcgaggctcccaccctgaagccctggaggtgcacgtgggtaaggtgcaacctagaccagtgttccttccatgggtggccccactgccacaaggagtcggcctggcaaacagaccttctaggatcgggatctccatctctcaagtcctgggttccatggctcatcccccaggtctccatggtctatttcccagggttccatggtccacctcccagggttccatggtccacttctcagggttccgtggtctacttcccagggttccgtggtccatctccccgggttccatggtctatttaccagggatccgtggtccacctctcagggttccgtggcccacctcccgggttccgtggccacctcccagggttccgtgttccgcctcccagcgttctgtggtccacctcccagggatccatggttcactttccagggttctgtggcccatctccctgggttctgtggcccatctcccagggttccatggttcatctctcagagttccatgggttcatctcctagggtcatctcctagggtccatctccaagggttctttggtccatctctcagggttccatggttcatctcttaggattctgcagttcatctcccagggttctgtggcccatcccccagggttctgcagtccatctcccagggttccatggtccatttcccagggttccatgttccatctcccagggttccatgttccatctcccagggttccatgggttcatctcctaagggtcatctcctaggatccatctcccagggttccatgggttcatcttctagggtcatctcctagggtccatctcctagagttctttggtctatctctcagggttccatggttcatctcctaggattctgcagttcacccccagggttgcatggttcatctcctaggatccatctcccagggttccatggtccctgtctcagcattctgtggtccatctcccagggctctgatctccattccaggactctatgccccaggtcctgacctcctccctcctggtcatggttattgtggcctcttagcaaagacctggtggtcgctgagtggcagctgatctctcagaccctgtaggccccctggacaaggtgaggaaggccaagatccgagtcaagaccagcagcaaggccaaggtggagtctgaagagccacaggacaatgacttcctcagttgcatgtcccggtgggtggcaggaccttgggggtgggaggggggtgggactggaggtacgggtctccctggtcccggcctgggcagctgagtggtgcctgccgggcggggcaggcgctcgggtctgcctcgctggatcctggcctgctgcctcttcctctccgtgctggtgatgctgtggctgagctgctccaccctggtgaccgcgcctggccagcacctcaagttccaggtgggtgggatctgtgaatggcgctgggccgagggagggggtgaaggcagagagagctgtttgctggtcctggatttggccacctgctcccatggaggccaggacctcagacatttttttcttttttcatgtatatacatatatatacatatacgtgtgtgtgtgtgtgtgtgtgtgtgtgtatatatatatatataatatatatatatatattttttttgagatggagtcttgctctgtcacctgggctggagtgcaatggcaccatctcggctcactgcaacctccacctcctgggttcaagcaattctcctgcctcagcctccgaagtagctgggactatgggcgcgggccaccacacccagctaatttttgtatttttagtagagacggtgtttcaccatgttggccaggctggtcttgaactcctgacctcaggtgatccatccgcctctgcctcccaaagtgctgggattacaggcgtgacccaccgcgcccggcctatatatatatttttgagacaggatctcactctttcacccaggatggagtgcagtggcatgatcacagctcactgcagcctcggcctccctggctcaagcaatcctcctgcctcagcctcctgagtagctgggaccacagtcacgtgccaccatgccccgctaatttttgtattttttgtagagatggggactatgttgcccaggctggtcttgaactcctgggctcaagtgatccacctgccttgccctcccagaataccgggattacaggcatgagccacctcacccagccaggacctcacacttgctgcatgacttgggccagtttcttcactgccctttgaattggtgggaagaaaatccactcttagttggggcgacatgaagtcagaggtggccacacttctgtggtgttggcctcacctctatcatgcccaggtgtgttggtgacacctctgtggtgcccagagcctgggcaacatagtgaaaccttgtcactacaaatcatttaaaaattagctagatgtggctgggcatggtggcccatgcctgtaatcccagcactttgggaggccgaggtgggcggatcacgaggtcaagagattgagaccatcctggctaacaaggtgaaaccccatctctactaaaaatacaaaaaattagctgggcgtggtggcaggtgcctgtagtcccagctactcgggaggctgaggcaggagaatggcgtgaacccaggaggaggagcttgcagtgagccgagatcgcgccactgcactccagcctgggtgacagagcgagactccatctcaaaaaaaaaaaaaagaaaaaaaaaattagctagacgtggaggtgcatgtttatgatcccagctacttaggaagctgaggtgggaggatcacttgagcctgagagttcgaagctgcagtgagctgtgatggcaccactatactccagcctggacaacagagaagaccccatcacacacacacacacacacacacacacacacacacacacacacacacaaaagtccaggtgtggtggctcacacctgtaattccagcactttgggaggctgaggtgggcagatcacttcaggagttcgagaccagcctagccaacatagtgaaaccccatatctactaataatacaaaaattagctgggcgtggtggcgtgcacctgtagtcccagctacttgggaggctgagaaaggagaatcgcttgaacctaggaggcggaggttgcagtgagctgagatggcgccactgcactccagcctgggtgacagagagagactctctcaaaaaaagaaaaaaaataaaacaatcagaggtgggaaggagacagtcagggttgggggctcggcctctccccgtccctccacttccctcctcccctctcttcctgcagcctctgaccctggagcagcacaagggcttcatgatggagcccgattggcccctgtacccgccgccgtcccacgcctgtgaggacagcctaccaccctacaagctgaagctggacctgaccaagctgtaggcctccactggccccatcactgccaactgcagggggcccctcgggcctcacttgccctgagcccaggagtccaagggcagggtgggtccagccttgagcccctccacccccaaatccttcctctcctcccagtcccaccccttgccccacggagtcctggggacgcagtgccccagctgggaagagggcgggatcgggcactggttcctccttgtccccgctttcttgggggcttgctactttttgtcttctattgtgtggctttctgagtatttgaaccccagtcctgtgtcaccttcctttttccttctatgtcccctctctgcggggggggcgctgaggctgagggggagctgcgtcttgctagggcttcccccttctccccatcccggtctccagagacccagcttctgagagacagggtgtgggcatctccatgcccctataaagcgtgcctggggcttgtctggggctggggaggaataaaccatgtatataaaagagtttcaggctgagcctgcttctgttcggttgtctgtctgcccttggggtgtggcccacgcatggctatgacccctgccgagcaggatctttctgacatgggaaagccctggaaacccaggtggcaccaggcactgaaagtagctgcctctcagaaggacactccctctggtctaacccaggtcacactcccagctacagatgtccctggaaaactgactcgaggccaggcgcagcagctcatgcctgtaatcccagcactttaggagactgaggcaggagattcactggagcccagaagttccagaccggcctggggcaacatagcaaggccccatctctacaaaatacacacacacacacacacacacacacacacacacatatatatatataattaactgggtgtggtggcttgagcctgtggtcccagctactcgggaggctgaggtgggaggattgcttgaggcggggaggtggaggctgcagtgagctatgattgcaccactgaactccagcctgggtgacagagcatgactctgtctcaaaaaaaaaaaaaaaaaaaagtggcttgtgccacccatctgactggggcagttcagcgtcccttcctgtgcctgatgtccctgttatgaagggacaaattgcatcttgaagaggacttgattttgtagccacctggcttccggtctactttttctttttcttttttgagacagagtctcgctctgtcgcccaggctggagtgcagtggtgcggtctcagctcactgcaaactccgcctcccaggttccagtgattctcttgcctcagcctccaagtaggtgggattataggcgcgtgccaccatgcgcggctactttttgtattttcagtagagacgcagtttcaccatgttggccaggctggtcttgaactcctgaccttaaataatctgcccacctcagcctcccaaagtgctgggattacaggcatgagcctctgcacccagccagctttatttatttattttttaaaaaatgagataggctcggccgggcacagtggctcatgcctgtaatcctagcactttgggaggccgaggcgggcagatcacgaggtcaggagattgagaccattctgggtaacatggtgaaaccctgtctctactaaaaatacaaaaaaaaattagctgggcatggtggtgggcgcctgtagtcccagctactcaggaggctaaggcaggagaacggcgtgaacctgggaggcaaagcttgcagtgagcagagatcacgccactgccctgcagcctgggcgacagagcgagactctgtctcaaaaacaaaacaaaacaaaacaaaaaatgagacagggtcttacgctgtcaccgaggctggagtgcagtggtgtgatcacagctcactgcagcctccacctcccaggctcaagccatcctcccatctcagcctcttgactgcaggaagggagccacgcccttccgttcctgtctgttctgcagactcctccagattcttcttgtaactccgctttgagattcagttgacttgagttggtttctgttgctcgaaaccagagattcctgactgatacagggcctcatcccctgggcagagctcaggatcaggagcatgatggccccagcctacaggcaatggggtggagagtcccaggaattccaggctgatggagtgacagtgggtctgcaggttggggcagaaaattaaatgatgcctcctggggctgtgtgtaagactctccacccttcactctaccctggatcctggaaggttgatccacttggaccctcttctttccactggagtcagtcagagggaccactggcaggagatgagaggagggaggagtcaaggtctttcctggtgtccttcccagcatcccctgactcaagaccacaactcgaccaagcagcctcccctggagatcttcaagagctctggaggggcggggcgcagtgactcatgcctgtaatcccagtactttaggaggcagaggagggtggatcaactgaagtcaggggttcaagaccagcctggccaacgtggcgaaattcccgtctctacaaaaatacaaaaattagctaggcatggtggcgcactcctataatcccagctactcgggaggctgaggcaggagaatcacttgaaccctggaggcagaggttgcagtgagccaagactgcaccattgcactccagcctggacaacaagggcgaaactctgtctcaaaaaaaaaaaaaaaaaagaaaaaaaagggccccttggccgggtgtggtggctcatgcctgtaatcccaggactttggaagtctgaggcgggaggatcacttgagtgtaggagtttgagacaaatctggggaatatagcaagattcatctctacaagaaatttaaaaatttagccagacctggtggtgggcaccagtaatctcagctgctgagctgaagctgaggtggagggatcacttgagcccaggaagacaaggctgcagtgagccatgattgcactaatgcactccagcgtggctgagaagagtgagaccatttccaaaaaaataaatagataaatcaaaataaaaggctgggctcggtggctcatgcttgtaatcccagcaatttgggagggtgaggcggaaggattacttgatgccaggagcttgagaccagcctggccaacatggtgaaaccccgttcctactaaaaatacaaaaaattagctgggcgtggtggcccatgtctgtaatcccggatatttgggaggctaaggcatgagaatccttcaacctgggaggcggaggttggagtgagccgagatcatgctactacactgcagcctgggcgaaagagtgaggcactgtctcaaataatagcaataatagcccgggcacggtagctcccacctgtaatcccagcactttgggaagctgaggcgggtggattgcctgagctcaggagttcacaaccaacctgggcaacatggtgaaaccctgtctctactgaaatacaaaaaatttgccaggcgtggcagtgtgtgcctgtagacccagctacttactcaggaggctgaggcaggagaattgcttgaacccaggaggcaaaggttgcagtgagctgggatcatgcactgcactcctgcctgggagacagagcaagactctgtctcaaataaataaatacaataataataattgttcctttaggccaggcagggtggctcacatctgtaatcccagctcttcgataggcccaggtgggaggatcgcttgagcccaggagttcaatgttacagtgagttatgatcatgcctaggtgacagagtgggactgtggttcaaaaaatacatgtatagcccatttatgtatgtatgtatgtatgtatgtatgtatgtatgtatgtatgtatgtattttgagacggagtctcgctctgttgcccaggctggagtgcagtggtacgatcttggctcactgcaacctccatcccctcggttcaagtgattcttcgacctcagcctactgagtagctgggattacaggtgcataccaccacgcccggctaatttttgtatttttattagagccaggctttcaccatgttggccaggctggtcttgaactcctgacttcaggtaatccgttagcctcggcctcccaaccactttatttattaatctattttgagacagagtcccactttgtcgcttaggctggagtgcagtggcgagatctgggctcactgcaacgtctacctcccaggtttaagtgattctcctgcctcagcctcccaagtagctgggattacaggtgcaagccaccatacctggctaatttttgtatttttactagagacggggttttgccatgttggccaggccggtctcgaactcctgacctcaagtgatccgcctggtaccatgaccatcaggattcaacccagatgtaatatgggccccagggagtatcattctgggccctgtgtggggtttcaggaaaacctctaggaatgttgcccagaaataagacatgggcagaggtgagaagagaatgacagccagccgttctctttggtagaactttctttgatgatagaaacgttatgtctgcactactcccagccacctggaagttactgagcacttccaacatggctagtgtaactgacaaattgtgtttcttattttgtttagtttgagttgatgtacatgtaagatttttccggctgggcacggtggttcacagctataatcccagcactttgggaggctgaggcaggaggatcacttgagcccaagagttcaagaccagcctgggcaacatggtgaggcacctgtcttctttttttgagactgagtctcacactgtcgcccaggctggtgggcagtggcgcgatctcagctcacaccaaccttcgcttcccaggttcaagcgattctcttgcctcagccttccgagtagctgggagctgggattacagtcacttgccaccacgcccagctaatttttgtattgttttattagagatggggttccgccatgttgactaggctggtcttgaactcctgacatccggtgatctgcccacctcggcctcccaaagtgctgggattacagcgtgagccactgcacccagctgaggcacccgtctttatttaaaaaaaaaaaagaaattgaccagttgtgggggcatgtgcctctagtcccagctactaaggtggctgaggtgggaggattgcttgagactaggagtttgacactagctcgggcaacatagcaagaccctttctctaaaacaattttttaggccagatgcaggcaacaaagtgaagccctgtctctacaaaaaatatacgtatatacaaaattagccaggtattatggcggctgcctgtagtcccagctactcccagatacttggaaggttaaggaggaaggattgcttgagcctggggaggttgaggctgcagtgagctgtgactgcaccaccgcataccagcctgggtgacagagtaagatcctgtctctgacatgacatcatgcctggctaattttttaatttttttttgagacagagtctctctgttgcccaggctggagtgcagtggcacgatctcggctcactgcaacctctgcctcctggtgtcaagcaattcttctgtcccagcctcccgagtatctgggattacaccacgccaggctaatttttgtattttgttagtagacatgggattctgccatgttggctaggctggtcttgaactcctgaactcaggtgatccactagccttagcctcccaaagtgctgggattacaggcgtgagccaccatgtccagcctattttttgattttttatagagatgaggactcattatgtcgctcaggctggtcttgcactcctggacttaagtgatcttcctgcctcggtctcccaaagtgctgggattacaggcgtgagccaccatgcctggtcaaaatttgccattttcatgagttttgagtgcattaattgcatccacaatgttgtgcagccatacctgccatggattttttttaaattgttattgtttttgagacagagtcttgctctgttgcccaggctggagtgcagtggtgcaatcttggctcactgcaacctccgcctcccaggttccggtgattctcctgcctcagcctcccaggtagctgagattacagacatccaccaccacaccgggctaatttttgtatttttagtagacggggtttcaccctgttggccaagctgctgttgaactcctgacctctctcagccttccaaagtgctgggattacaggcatgagccactgcggccggccctgctgtggatttaaatggctactgtcactggtcagcccagtttgaaagggacttcatatggactcactctgtctccttgcctggcccccagtttctcttcttagtggctctagacatctgggctgcatcttgattcttaactgtcctcacctcacttcattccatcagcacagcttgtcccctaggcctccaaagcatacctccagcccacaagcatctctttgtctccatggcaaccaccgaagtccaagctgccactgcctctcactcagcaatggtgcccacctcctcctcttggggcttccggcctctccagttgccctctggttccatcttggataaagcaaatctgaccccagactccacacctttctggggtttactgttgtcttgaggagcccaaacattcccagacagcagagattcccacgatcgggtctcactaacactaacctaacatctccaagcgcttttttttttttctgagatggagtttcactctgtcgcccaggctagagtgcagtggcgtgatctccgctcactgcaagctctgcctcctgggttcacgccattctcctgcctcagcctcccgagtagctgggactacaggcgcccgccaccacgcccggctaatttttttttgtatttttagtagagacagggtttcactgtgttcaccaggatggtctcgatctcctgactttgtgatccacccacctcggcctcccaaagtgctgggattacaggtgtgagccactgcacccggccatcaccaagcgcttctgtgaggctctgcccctcactccctctgctctggcggctgcgtgaggttctctctggatttcttgagcctaccttgttccttccagccccagggcctttgcacatgcagtcccctctgccaggagcacactcctggtcctgcttcaccaagttctcagccacgtcagcatcccctgggatccccatgtttcacttcctgtccatcttccctgctctgatgacattcgtcgttgattaaaaattatttgttggctgagggcagtggcacatgcctgtaattccagcactttaggaggctgaggtgggcagatcacctgaggtcaggagttagagactagcctggccaacatggtgaaaccctgtctctactaaaaatacaaaaattagccaggcatggtggcacgtgcctgtagtctcagctactcgggaggctgaggcaggagaatctcttgaacccggtaggcagaggttgcagtgagccgagatcatgccactgcagtccagcctgggcaacagagcaagactctgtcttaaaataaatacataaataaaaataaaaataatggaggccaggcatggtggctcacacctatagtcccagctctctgggaggctgaggcaggtggatggcttgaggtcaggagttcgagaccagcctggccaacatgacgaaatcctgtctctactaaaaatacaaaaattacctgcgtgtggtggctcaggcctgtaatcccagctactcaggaggttgaggggggataacctaattctcctgctcacctatgaagagcttttgatctttgccagcctggcagccacctctcctgtgccatccctcctgccttttggtcttggagaccaaaatgcgcttgtcctcattttgaatcaatggtctggccttggggccttttctgcagcttccctttgctttgcaatgctgttacggacttggtaggcatctacccagcacctgcagtcttccttcttccttcgttttatttgtttgatttttgttgtttcatctgtcgtccaggctggagtgcagtggcgcaatcttggctcaccacaacctccgcctgtcggattcaagtgattcttctgcctcagcctcccaagtagctggaattacaggtgtccaccaccacgcccggctaattttttgtatttttagtagagacaaggtttcaccatgttggccaggctagtcttaaactcctgacttcatgatctatccacctcagcctcccaaagtgctgggattacaggcgtgagccactgtgctcagcctatttacttctttatgggttcatcttctgcctcctacatcactcaagactgggctcactgggagggcagggctgcatcggctgtgaccccagtacccatcaacgcaggtcacagaggaatgacccaacaagggtgtctgggatggctgggaaagaaccccgcttgccatgcagaggccttggggctgctctgcccagtaaccaaccccttaccctatcctgactctcaggagagaaaggcctctttgaccacgtagctgaagaccagactcaccacagctctgtctctgagcttcaatttcctcttctgtcctagagccctgcccctccctccattttcatcctgagctgcacacagacctggtagtgggtgggtgggtggctggcgtcatggcaacggtagcacagggttgccacagcaacttggttccctagtgacaggcctgagtttcttagcccaggggtggcaatccgccaggaagaaatggggagagggtgtccccagcatccagctggcacacaggggacattctgtaaacacttggagggcaggatggggatgcatggtggctgtcttttcctggggtgcgaagaggagacttcaggtccctgttgggctccatgcagctcctggcacactctccctcctcagggcccccatgcaggctgttccctccgcctggaggctgttccctcttcgctccgtctggccagctcttcagcctgacctcctggctcagccccagcttttatcatggtgacaattaagtgatggcttgtttgcttgtgtgatgattggtttaataaatgttccctctgccagatgctatgcgctaggcgtctcggtcacagctgtgtcccacacaccaaggaggctgctctcaatacatctttgtcgacactctccatccttgctccgccttgcccacttcttccaagccagtgcggcctcatctctatcccttgagctttttctggcactgggcttaggtccttcatattatgtcctctcagaatatacgggaacattgcacaatgttctggaatgtcctggaacattctagaacattctgtccccttcttttactgaagctgggacatcatcacctcttcagggaggctctccctgatcttctggctgaagcagtgctcccctacccaacacacacttgatcgctctcagctcattgccttcaaggcagttattgccatctgaaatggccttggtcattgatcaattatatatctcagatttgtctttcccatcagaatgtacctttcagaatatcttggaacatgaggtcaaggatcttgtcggatgggctgacagttgaatccccagcagcctctcagcaccctagtccccacagtggtgggtcccagttggtcgccccccagaggtagtcctagttcttatcacattgggtggatttgaccttttctttttttttctattgggatgggatccctctatgttgccacggctggtcttaaactcctggactcaagtgatcctcctgcctcggcctcccaaagtgctgggattacagtcttgagccaccgcaactggcctgattttgttttagtaaatcagctttttttttttttttttttttttgaggcagagtctcactctgtcacccaggctggagtgcaatggcttggctcactgcaagctccgcctcctgggttcacaccattctcctgcctcagcctcccaagtagctgggactacaggtgcccgccactacacccggctaattttttgtatttttagtagagacggggtttcaccgtgttagtcaggatggtctcgatctcctgaccttgtgatccacacaccttggcctcccaaagtgctgggattacaggcgtgagccaccgcgcccagccttagtaaaccagctttaataagacataatttacatccaatggcacatccatgttaaatgcccagttcaatgagttttggcaaatgtaatcctcctaagatacccctataatcaagatatacactaggtatggtggctcacacctgtgatcccagcactttgggaggctgaagtgggagaatcacttgaggcctggagttcaagaccagcctgaacaatatagtgagactctgtctctaccaaattttttttacaaaattagccaggtgtactggcatacacctgtggtcccagctactctggaggctgaggtacgaggctcatttgacccaggaggttgaggctgcagtgagctatgattgcgccactgcatttcagcctgggcgacagagtgagaccttatctctaaaaatataaataaataaataaaagggcccggcgtggtggctcatgcttgtaatcccagcactttaggaggctgaggtggacagattgcttgagctcagaagctcaagaccagcctgggcaacatggtgaaacctcaactctacaaaaaaaaaaaaatgcaaaaattagctgggcgtggtggcgcacacctgtggtctcagctactcgggagactgaggtaggaggatcacttgagcccaggaagtcaaggctgcagtgaactgaggttgcaccactgcactctgggtgacagagtgagaccctgtctcaaaaaaataaataaataaaaataaaataataaaattagaaaggcatggtggcatatgccttatagttctagctactcaggaagctgaggagggagcatggcttgagcccaggaattggaggttacagtcagctatgatcgtgccactgcactccagcctaggtgacagagcgagacgaagaccctgtctttcttttttttgagccagagttttgctcttgttgcccaagctggagtgcaatggcatgatctcggctcactgaaacctccgactcctgggttcaagccattctcctgcctcagcctcccgagtagctgggattacaggcatgtgccaccacgcccggctaattttgtatatttatttatttattttatttttatttttatttttattttttttgagacagagtctcgctctgtcacccaggctggagtgcagtggtgcgatctgggctcgctgcaagctccgcctcccgggttcacgccattcttctgcctcagcctcccaagtagctgggactatgggctcccaccaccacgcctggctaattttttttgtattttttagtagagacggggtttcaccatgttagccacgatggtctcgatctcctgacctcgtgatctgcccgcctcggcctctcaaagtgctgggattacaggcgtgagccaccacgcccggccaattttgtatttttattagagatgaggtttctccatgttggtcaggctggtctcaaactcccgacctcaggtgatccgcccgccttggcctcccaaagtgctgggattacaggcgtaagccaccgcacctggccaagaccctgtcttttaagaaaatggataaataaaacataaaaaaagaaggtagccagtcgaggtggctcgtgcctgtaatcccagtactttgggaggccgaagtgggcggatcacctgaggttgggagtttgagaccagcctggccaacatgatgaaatgctgtctctgctaaaaatacaaaaatcagccaggcctggtggtgggcaactgtaattccagagacttgggagggtgaggcaggagaatcgcttgaacccgggaggtggaggttgcagtgatatgagatcgcgccactgcactccagcctgggcgacagagtgagactctgtctcaaaaaaacaaaacaaaacaaaaacaacaacaaaaatttaaataaataaataaaacataaaaaaagaaggtggggccagtgcagacatgacttcaaggaggtgcgggaggctgctggctggggtaacagagagagatcatggtgtttgtcagcaagcctcactcatgatcctgaaaggatgtgccgcctccattaaaaaaaaatttagggccaggcgcagtggctcacgcctgtaatcccaacactttgggaggctgaggtgggtgaatcgtctgagtcaggaatccaagaccagcctggccaacatggtgaaaccctgtctctactaaaaatacaaaaattagccaggcgtggtagtgcatgcctgtaatcccggctacttgggaggctgaggcaggagaattgcttgaacctcggaggcggaggttgcggtgagccaagattgtgccattacactccagcctggtgacagagcgagactctgtctcaaaaaaaaaaaaaaaaggtaaaacacagagtttgttagataggagaaaaatcaaacaggactgaggacagggagttgatgtcgggggaccttgggcttgccccaggaccactccgtggtgactgcctgatggggcagacactgtccccagcctaaaaccacaggaacttgaagccctcccccaaggcttcactttcctcctccataacacctggggattgtaagggaggcctccaagctctgacctgagggtgtgagccctgcagctggtctgaagtgggagagcaggtggcgcgggccctgcctctaggagagccgtgccagctgtgggccagatggtggccaggcccgtggatgctgcctgctatgtccctgcctgccggctctgctagaccacaggtcatcattactggatgaggcgtgtgcagtcaccggcgtgggccctccaggtcctccacttgtctctgctccatgccagtgatagtggcctctagagctcaggccaacagctctggcagaggtcactggcctcactctgcctcactcgacatcccatctgttccatctctttttggtcccacctgcaaagtgcatctcaactaggactacctcccacccctccatgtctgtcaccctgggatgagccctacccatttttccctggattatatgcctcctgactcatgtcccaaattcaagatattgtcccccagttgtcagacactgttgaacagtcagacactgtaacactgttaaattgacactgttaaaaccaatgtcagctgggtgcagtggttcacgctataatcctggcactttgggaggctgaggcgggcagatcacttgaggtcaggagttcgagaccagcctggccaacatggtgaaaccccgtctctaataaaaatacaaaaattatgctgggcacagtggttcactcctgtaatcccagcactttgggaggccaaggcaggtggatcacttgaggtcaggagtttgagaccagcctgtccaacatggtgaaaccatctcaactaaaaatacaaaaattggctgggcgtggtggcacatgcctgtagtcccagctactcgggaggctgaggcaggagaatcacttgaacctgggaggcgaagattgcagtgagctgagattgtgccacggcactccagcctgggtgacagagtgagactccatctcaaaaaaaaaaaaaaaattagccaggcatgtggtacatgcctgtagtcccagctactcaggaggctgaggcaggagaatggcttgaacccaggaggcggaggttgcagtgagctgagatcgcaccactgcactccagggtgggccacagagcaagactccgtctcaaaaacaaaacaaaacaaaacaaaacaaaaacccagtgtcaattacattgccactgcttacaagccccctctcccttctcatttcatgcagaggaccccaaaaatgatccccaaagccctctgtgacctgaagcacctcctgttgcctcccacccattctcctcccctctcctctccctcttcctaatttttctctgccaggccactctctaggcacgctcctgccccagggacattgcactggctgccctgtgctatgtgatcgtggaggacagatcacacagtgtgtccaaagtgcagtgagtctacagcacactatgtgtgtgtgcacagccaggagcccagagaacctcttctttcttatcttcagctgtgtgtcttgtgtgtctgacatatgggtcaaatctggatgtttatgaagtgtgcgtgcatatggacaccattgatttcaaatgttatttgtggcgggtgtgtcagctgtaggtcgctgctgagtgaggtttgatgcctgcatgtggttcgtctggaacaaagactcctggggcggtgctgacttagggcaggcaagggtgtgtgtgtgtgtgtgcagagcttgccggaacgtgagctgttcatgcacgcgtgcattcaacatttgcagagtgcttactgtgtattggagatgccagcagttcccttcagcacttggtatctgtcagcttgcacagggtcatctgagagcattttgtgtaacgattgagcacgtattgttgtatcaggccctctgttggagatgctggttgagtgcggtccaacctgcaggagtccactcaagcaggccccttccttcctcctatggggtctccagccccatagccacctccttcttccagcactgacgggaaagaaggctttgagctccttctggatcactgctttctgcccaagactgcacaagtcagagttttctgacttggaggttaaaagaataaatgagctccaagctacagaggggatcctgggagcctggagcttaccagagatggggggtgaggggtgcccccaaaaggtctagatgcttcatagacgcctatagatgcaggactttgagccctggctgagggtcagtgtgttgggagggctggtgcttggggatctgagggtgttgggtccggtggaatggactttgggagtgtaaggtttgaaggatctgtgggcagggatttgggggagtgggagatgagttttgagtagagaatgggagataattggatgtgcagggttttagagtatgagaaaccagaattggtgtatgaagcaggtggtgggaacctaaggccagatgattggggtctcagggtggaggctctgaagagggtatgtcaggggagggtggggaaccatgaggggctggaagtctgaggcctgggcatgggtgagtttcgcccctgagagaggcctgggaaggaggtaagactggagtcggggtgtgcagggtggggagagggagggtgtggttctcagagcttagagacccatttctccatgctccatctcaccctccctcccaccctacctataactcacttccctgtggctccaacgcctcaaagtataaccacgcccagccaacgcccggggcacgcctgccagcgccccagggcactcacagacactccttaacacctgcacgtgccccgcccctcctcagatccgccgctcacttagcccggccccacccccatcagatgaggctccgcccccccggccccgccaatccctcgccccctccacgcacacacccctgatcttccccgccctccttccaaccagactccacccctcgcccaggccccgcccttcctcagaccaggccctctcttcgcttgaccacatccatccccagattcctcctctctcctgcccagacccgcccaacctcagacccatcttctcctttctacctccccgaccactcccccaccgcattcctaacctccaccttgtcccttctcacacctggccccgccctttatcctgcgccccgcctcctccgcaggccggacccttgtccctcctcctcttgccctgggcctgccccttcttcagaccccgccccactcctcagcccagggaccaaccccatcctgcgcctacttgtcctgcttcgccccgtccccacctatccacagacaatacgccctctcagcccagaaccgcttccctttcagacttggttccgcccctcacgccagggtcccgccccaatccggcacccctagcccaggccccgccctggacccacctctctgcatagcaggcccctccctttatcccagacccgccccggccctccgtagaccacgcccctccgattccgggcccgccccaatccttggtttctggtcccggccccgcccctccgcagacctggccccgccccgccccccgcgtctcggtttcccgggcctgcgcgcgcggctcccgtcactcgaacgcgcgacggcggggggaagatggcggagtccggcggtagcagcggtggtgctggtggcggcggcgctttcggcgcgggcccgggccccgagcgcccgaacaggtgagacccggcccgcaggatagacctgcacctgtcttggagcccaggaaacctgtgggcagtcttgggcgtcctgaggggttgaggggaggcctggcacggctcgagggtctttcgctgagaatttggactttacggggccgtggggtactggaggagccgagggctactgagggggtggctggaggggggctgggtgccccaggacctcgaggcgtctgcaggcggccctagggacctgagaatcctgggggtctgaagggaaaccgaggggctcttgactgtggtgggccgtggggcaactggggatgccaaagggcctgggcagcagagagggcctgagcaggggccatgccatggccagtctgagggtggtgaggtgtcttgggggctctgaggaaggggctaaggcccaaggcatcctgggaggtgctgaagggccccaaggtggctaaaggtggtcctgagagcgtgctgaggggcgctggaaggagtagagactgtgggaggctctgggtgggggacttaggtgaatctgggagtctgagatggggaggctgagggggcctggggtgggtctagggaacctgaggggggtgagagaactccagggggtttataaagaacatacagagggttcttctttggggctcctcccttccatccccatggggtccaaatccacatccccaacaggctaaaggacttacagaaaggtcttgccctcagacaaggggacagaattcacccctttggtcagagggaggccccctttccccatggcccagtcctgacatggattgcttgaacgtccaggtttgcatgacaattagttatcatcaataactaatgatatgtgtgtgcatgcattgtattggattgtcagagggaaagaacacctgccttaggagtgtgatctcctgctcttttcctattgggcaaagccagaccctcccaccccagctcctcctctagcccagcacccaggtcaggccaaggaggaaattcaggctttttcttgctggtgagcttccaggagccagtaatttcaggcaacatgataaatgatgaagttgtttgatacttacgtgctgtggagttttggacctgtgggctgattgttggagggaatggcctgatggcctggctgtgtgatttggtactgaatggaacacgcatgggatgggtggggaagggaggagggatggctgggccagggcacagaggaggcaaaggccctgcctgttcctgaggatgctgagtggcaccttgagacttaggtctgtgggcattgaatctggtctgccagaggggccatggggaacccaggaggtgtgtgtccagaggggtgaccagcctcctggggtaggtgtggggcaagattgtcctgcagtagggagccaggagatgtcagaggattttcagagatattcagggagtggccagggcttgaaaattgggtatcagttggcaagtaagggacagggaagagggacagtgaaccccaggtccctgccttgggcactggagtgggataacctggggctagggctttttttatttttatttttttgaaaccccgtctcgctctgtcacccaggtatctaggctggagtgcagtgacgccaccaaggctcaccgcagcctcaaactcctggactcaagtgatcctcccacctcagcctcctgagtagctgggactacaggtgtgcaccaccacacttggctaatttttaaattttttgtaaagaccaggtcttgctctgttgccaggctggtctcaaactcttgggctcaagcaatcttcttgcctcacccctcactaagtgctgagattacagatgtgagccaccatgctgggcatggctctttttttataaacagctttatcaagatataattaattgcatggcatacaattcactcattttgtttttatttatttatttattttttgagacagaatcttgctctgtcacccaggctggagtgcagtggcgcaatctcggctcactgcaacctctgccttccaggttcaagggattttcctgcctcagcctcctgagtagctgggactacaggtgcccgccaccatgcctggctaatttttgtattttttaagtagagacagggtttcactgttggccaggcaggtctggcattcctgagctcaggtgatccacccgcctcggcctcccaaagtgctgggattacaggcgtgaactactgcacccagccaattcactcattttaatttatcattaagttttttttttttttttttttttttttgagatagagttactctgttgcccaggctggagtgcagtagtgtgatctcggctcactgcaacctttgcctcctgggttcaagcaattctcctgcctcagcctcccgagtagctgagaccacaggtgcatgctaccatgcccagctaatttttgtatttttagtagagacggggttttgccatgttggccagggtgatcttgaactgctgacctcaagtgatctgcccgcttcagcctcccaaagtgctgggattacaggtgtgaaccactgtgctcaacccaggtcattaagtttcagtacatttactgagttgtgcatccttcaccacaatccagttttttggaatgcttccatcaccccaaagagttcccccaagctcgtctgcaattaaccctgctccaccaacatacagccccggggacatcctgatctgctttcactctctgtagctttgccttttctagaaatttcgtaagaatggaatcagacatgtggcctttacgtctggtttctttccttaacataatgtttttgaagttcatctgtgttgttgtatcagaaatttgttctttttcactgtggagtgaaaataaacaaactgtgtccgtccatacaatctcgtatggacggacacagtttgtttatccattaactggttgatggactgttgggttgtttccattttgacaactgcaaataaagttgctgtgaacatctggatatgtgtctctgtgtggacgtatattttcatcctcttgggtaaatacttaagagtagaatgactagttcatatggtagatgtgtttaaatttctttttttttgagacagggtctcactctgttgcccaggctgaagtgcagtggtgcaatcacggcttactgtagcctctacctccttgggctcaggtgatcctcccacctcagccttccaagtagctggtaggtactacaagggcgtatgccaccacacccagctattttttctgtgcttttgttgagacaaagtcttgccatgttgcccaggctggtcttgaattccagggctcaagcaatcttcccacctctgcctcccaaagtgctgggattacaggtgtgagccactacgcctggctatgttttaatttttttttttttttttttttttttgagatggagtctctctctgttgcccagcagttgttcactgcaacctctgtctcctgggttcaagtgattctcctgcttcagcctcctgagtagctgggattgtaaggatgcgccaccacactcagctaatttttgtatttttagtagagacggggttttgccatgttggccagactggtcttgaactcctgacctcaggggatccgcctgcttcggcctcccaaagtgctgggattacaggtgtgagccactgagactggccatgttttaatttttaggaaactgccaagcttgttcccaaagtggctgtaccattttgcatccccaccagcaatgttcaagagttccagctcctcctcatcctcactaacacctggtatggccagtccttagttttagccattcttataggtgtgtgctggtgtcttcatttggtgtttttatttatttatttatttgtgagatgaggtctcactctgtcgcccaggctggagtgcgatggtgcgatcctagctcactgcaccctggaactcctgggttcaagcaatcttcgggcctcagcctctggaataagtgggattacaggtgtgcacaccactgttcccagtcttattttggttttaatttgcatttctctaataactaatgatgttggacagtttttcatgagcttcttagctattcatctctttggtaacgtgtcttttcaaatgtttgggccatttttaagttgggttgccttttttttttttttttttttaagactgagtctcgctttgttgcccaggctggagtgcagtggtgcgatcctagctcattgtaacctccacctcttgggttcaagcgattttcatgtctcagcctcccgagtagctgggattacaggtgcatgctaccacacccggctaatttttgtatttttagtggagacggggtttcaccatgttggctagactggtctcaaactcctgacctcaggtgatctgcctgcctcaggctcccaaagtgctgggattagaggcatgagccaccacacccggctctttttcttttttcttttttttttttttgagatggaggcttgctctgttgcccaggctagagtgcagtggcgtgatcttggctcactgcaacctctgcctcccaggttcaagcaattctcctgccccagcctcccgagtagctgggattacaggcgtgtgccaccacacccggctaatttttgtatttttagtagagacggggtttctccatgttggtcaggctggtctcgatctcttgaccttgtgatctgcccgcctcagcctcccaaagtgctgggattacggcgtgagccaccatgcccggccctctttcttaaaagacatctttgtcattctcccctatcctccatcctagtgaaaaatcactgtttggagcaactgataggggcatctcatgcctcaggtgctagtgtggggagaacccctaatgtggcaagatggagcatgcagaaaatggatcatattttgagggagattggtacaagacattctcccaaaagtcattttgagacattgagtctttgtagcattgttcgtctgttccttcatttattgcaaatgggacagccaggcctggagcacgacccacctcctcgcctcaacctgcccacgtctccttcctcttcatccttccactctccaaggttctggcccctcagagccacctgcctgaccatgcaagctcaagtagtccccaggacacttttgctagtcacctagtgtgtgtgtgtgtgtgtgtgtgtgtgtgtgtgtgtgtgtgtgtttgagatggagtttcgcttttgttgcccaggctggagtgcagtggcatggtcactgcaacctccacctcccgggctcaagcaactgattctcttacctcagcctcccgagtagctgggattacgggcgcctgccaccaagcctggctaattttgtatttttagtagaggtggggtttctccatgttggccaggctggtctggaactcctgacctcaggtgatctgcctgcctgggcctcccaaagtgctgggattacaggcgtgagccactgcgcccggcttgtggttttttgtttgtttgtttggtttggtttgaggaagagtctcactctgtcgcccatgctggcatgcagtgtcgtagctacctgcagccttcttgacctcctgggctcaagctatccttctgcttcagcctcccgagtagctgggactacaggcatctactaacacacctaatttttttttttttgagacattgtctcattctgtcgcccaggctagagtgcagtggcacaatctggactcactgcaacctccacctcctgggtttaagcgattctcctgcctcagcctcctgagtagctgggattaccagtgcacgccaccacgcccaaataatttttgtatttttaatagagacggggtttcaccatgttggccagggtggtcttgatctcctgacctcgtgatccacctgccttggcctcccaaagtgttgggattacaggcgtgagccactgtgcctagcccacacctgactaatttttaaaaattgttttgggccgggcgcggtggctcatgcctgtaatcctaggactttgggaggccgaggtgggcagatcacttgaggtcaggagtttgagaccagcctagccaacatggtgaaaccgcttctctactaaaaatacaaaaattagccaggattggtggcacgtgcctgtaatcccagctactcgggaggctgaggcaagagaatcacttgaacccgggaggcagaggttgcagtgagctgagatcgctccactgcgctcccacctgggcgagagaaccagactgtcttaaaaaatatatatattattttatagagatggggtcttattattatttttttttgagatagagttttgctcttgttgtccaggctatagtgcaatggcatgatctcggttcaccaaaacatccgcctcctgggttcaagcgattctcctgcctcagcctcccgagtagctgagattacagacatgtgccaccatgcctggctaattttgtatttttagtagagatgcggtttctccatcttggtcaggctggtctcgaactcctgacctcaggttatccgcccaccttggcctcctaaagtgctgcgattacaggcatgagccactgtgtccggccaagatggggtctgattatgttgcccaggctggtcttgaactcctgggctcaagtgatcttcctgccatagcctcccgaagtgctgggattacaagcatgaaccactatgcccaacctgtatttttgttttttgtttttgaggtactatatatgtaacacaaaattcacccactttaagtgaacaattcagtggcatttagtacattcacagaattgtgcaaccatcactgctgtccagttccaaaacatctttgtccccgcaaaaggtgaccccatcttcattagcactaaccccctattctccattgcccagcccctgacaatcaccaatctgcagtctgtctctatccgttttcaagttttataggtagaatcatgcactatgtggccttttgagtctggcttctttcactcagcatgatgctttgggggtcatgcatgttgtagcctaaatcagcacttcattcctttttatggctgagtaatattccactgtgtggatgcaccacatcatccattcatctgttgatggacacttagattggttccaccttttggctattatgaatcatgctgctatgaacatgagtgtacacatttttgtctaaacactcatgttcagtcctttggggtacacatctaggagcagaattgctggggcgcatgcttgttgtatattcttgatcatgctggtcaccacctaacgttatttgttgtgtttctctggtgccttgaggttggaaagcctgtctctcttgtgccctcttgtgtgcctggaacatgaatgacacagaaggaggaagtgtcccagagacgtggctgagagggaggaagggagggatgggggtgtgcaaaagcttattgctctctgaggcttgcagtctggcaggtaggaattcccttctatgggatcaggtcgatcttttgcctttccagtgaggcttgtggggctgctggggggcagtgggggctggccttagtctctagctgcctttctagcctgccaggcaacgcccgcatctgcctttttgtcccacgaaggttttgtcttttggccaggggcgggggcagttcctgtcttccccctggcccttccagcggtaccacaactcaagaaactgtccccaggagggactgcgctcccccacccccgaccgcccccaacgttatataacttgtttgttccaacttctgtcttctgcaaccgagggggaaaaaagaaagagaaaagcttattctccttccttcctatctcgagggatcaacaaaaaacccgttgcctagtagaggtggtcattaatgactgagccgaacctcagggatggacagagtggggctgccctggctggggtgtgcggagaggaggtggggtccttgctgcaagcacaaaggacacttgttcaccagctggcctcctcccagctcgggccgcggggtctagactccttggagggaaaggaggcttgggccacttggggtgtcgcaaggggaggcaaaccctctggggagtcgcacctccccagctaaaattctgtcactgtgaggtacctgaccggcagagttttggaggaaccttctggccttgcagcctctccgacatgggcctttggcatccacgctttttggcccacgctccctggagacgcctgggtagggcccaggctcactgagtcatgctgttcctgggggtgaggtggggggatctgggtgagggatgtgccagcttcaggcatttgcataagaagtggtggctaggctgggtgctttggctcactcctgtaatcccagcactttgggagcccaaggcaggcagattacaaggtccagagtttgagaccagcctggccaacatagtgaaaccccctctctactaaaaatacaaaaattagtcaggtgtggtggtgggcgtctttaatcccagcaactctggaggttgaggcaggagaatcgcttgaacctgggaggaggaggttgcaatgagccgagatcctgccactgcactccagcctgagcgacagagtgagactctgtatcaaaaaaaaaaaaaaaagaagtgatggctgggacgttgtgcccaggggctttgctgcctgctgaaagtgtttgcatggaaagttgtggccgagacgctgcgcccggtgggtttgtcacagtcagtctggctgggtggcctttgcctgttgaagctttctccacaatctagatcatctccaccaagcccagaggccttggaagggtccagccccccagctcctgctaggaagacttaggggaagaggtggcttcccaaggaggttcttgctactttggggaagttctcattcctttggcctcttgcccctttcttttttattattattaattttttttgacgtcactctgagctcaggctggagtgcagtggcatgattttggctcactgcaacctccgccttctgggttcaagtgattctcctgcctcagcctcccaagtagctgggactacaggcgcccactaccatgcctggctagtttttgtatttttaggagagatggggtttcatcatgttggccaggctggtctcgaactcctgacctcaggtgatccacctgccttggcctcccaaagtgctgggattacaggcatgagccagtgcgcccggcctcatgcccctttcagaaggaggattttgacccttccaagacgtggactcaagtccttctcctggaaaatgtggtcagatatggcggcatgaggtgtctcatcatacccatgggtgactgtggctccctctttatgggttgtggctgtgacagattcctcatctgggaaatggggctccaggcccaccaggtggggggtgtctgggaggaaacgagtggggagaggtcacatgtacctcatcagtgttactgtggcagtgctgacgcccatgatggggacactgccatccttctgcccgccatgcccgcatgggccttgaggggatcgtcaatgccagcaagccttgatgtggcgtgcgtgtgtcaggcagggaaaggagagggtgaacttgagccattgggaagacagtagtgccatgacttgggccgtaagagggacagcagcaggggcagcgagagagtagagcacgtccagcgtgagctggagagggcaggttccgccaggagtaggcctgggagcaggagctcggcagggcgggggcaggggcggcggggggtggcgcgtctcagcagggatgggggcaggtggaactgggccagcccaagaagggcactggcccacaggccgagccacatccaggccactcgatctgcccctcacagctgagccccttctctgggaaggaggccaccctctcctcccctccttgtcggcaggtcccaagagctctgggagtggaattgctctgaaagcactcacttcaacctgaatcgtgcagtgcgatcgtcacagctggactgtttccacctggtagctgtgacccccgggacggcctccttgtcgttgtccgtagttaccggggaagaaaggctttattaccctccgccataatcgcaccatctccagggagcccctgcgaatgtcatcccacctcccccacggcgattactttttatctcacccacctctcctcagacactgtaaaagggaggctttctcctcactccagccctttggttttttcctttttctgatatttgtgtgtgtgtgtgtgtcttaccctttggttttagggaatgttttagatttggtgttaagaggccctggaggaggaagagaggaggaggaggaagagtggaggaagaggaggaggagatgagagggaggaggaggaagaggaggaggagaaaaagaggaggaagaggaggaggaagagaggaggaggaggaaagagagaggaggagaaaaagaacaggagaatggggagggagagaggaggatgagggggaaggacacagatagaaataattcagcgacttggggccttggatcctggaagaagggggtgggatctactgaaggcaaggggtgactgggcagcatgtgtcccggcatccccagctctttgctctgtggacaggatttgttagacacatttctctgcctttgtgcaggtgccacagtctcctgtgtccaccccatgcctggtgctggacatgaagggtccatgggacagatggaccctgcccatggggcgcatacatgccagcaggagttagagaacgtcgtgcggtcatttccgggctggctgggccagggggccagggcagggtttgggtgagcggcatatcagtcagcctcctgttttgaaaggatccctctgtaggccgggtgtggtggctcacacctgtattcccagcacattgggaggccaaggcgggtagatcacttgaggtcaggagttcgagaccagcctgggcaacatagtgagatccagtctctactaaaaatacacaaaactagctgggcgcagtggcgggtgcttgtagtcccagctgctctggaggctgaggcacgagagtcgattgaacccaggagccgagattgcaccactgcactccagcctgggcgacaaagtgagactctgtctcaaaaaagaaaggatccctctggcaagagacaagggaccctcggccaaggtgggccctggagggatggagaggcacacgcaggcttggggatgcctggaggttgagcttgtgctgactgatagtggtggccagtttctgccctccccaccgggcaggctgaaggtcagggttgtccttggtcccgcgcggctgcactgcctgcaacaagcagcagacttggaggcgccacctggcctaggggattcgcagcccttcctgtgttccagaaaagcccttcatgcctctccttgctcagggttcgtgccacttggagctcccacagtccttgagggcttcaggtcttcccaccagcaggtcccagtcctgggaatgtccctcctcctgagagaaggcctcagtctggctgcagctgcccaggaggtcctcaggtagcatctcttgtgggttccaccttcgagccacagcctggagccagctcctcctgctctctcctccccatcccagctcagagccactcctggctcttccccttctgggcatcatccccaactccagccagcgggaccctcctaaggcaggaatcagaccacctcactcccctgccggccacctgccagtggctccctcactctcagaacaaaatctacttcttgatgtgacccgctgggcccctgagcttccgcagctctgacggctctgctgggctctgaagcacgctcactggaatgtcctgtcccagtgatttgcacggctcaagtgttgtctcctcggggcctggccactgtgtccaccgtggcgccactgctcgccctgtcgtcatggtacattctctgcttgaggacccatgtccctgtagaatgtacgttccccaagggcagggctttatcagatctttttacagtggtggtcctggcgctggcacagctactggcacgggatggatgcttttgagtgtagatccagtgagtaccccaccccgaacagtcttcgatgcataccagaggggaagcctcctggcatagctctgcatgcccaggctggccgagggtcatccgcctcttcctcttcacttcattgaaccagcagggtgtgggcggagaagcagaaattcacaggcatgttgtcagtaaaccagccctgttacctgttacagagcccagggcaccataccgttttgcgtgtgctgtctttagtgagtgagcaaaacctcagccctgcatgttaaagcaaaggcggcaaacgacagccgctctctccctgtccagctgtctgaagtggaagtgggggccaagcccgctgggttcccgctgccggcagccccgccctcctcctctggtagccgctctgcagctgtgcggaccagctctcttaacacttgttaaccccagcctccagtcccttcctgccccccaccccgccccttccacatgtctctccggagagggccgcacagaattcacaggactcgtctccaacggctgcgccagcaattccctagcattcctcctctgcagagtggattttggtgcatgtccagcgtgatttcagacccctcactgcgcagcggagtgcctgatcgctctgtgtgcaccaccacggtgcacactgaaaatattgtgatctgggaggaagtaaccagcaccttgggggaatcacagacctttcctgcgagggcaagggcttccggaattgaacaggctgggcctggaggagatcttgaggggtggaccttcaggcttgtaaaggcctggaggggggtcacccgaggatcgaggccgaagatgtttactgacgccacaactgtgaaattccacaggggtcaaagacggacccgggcgggagcggtctgggctggatatccggagagttctgctctccacgggatgttagaatttgaggcagtctgcctaaggaggcagagcagagaggcatgtgatcacccagatcgtctgagagcgggacattttcccggagcggggtggaaggagtgtcaaggtgactgtgagatgacagacacgtaggggagccccacagaggacccccaagacaccctctctgttgccatcagcctgagtcatcctctatctgaaaaacttccaggactgaagttcgagttggaagcacgcgttctccttggtgaagtccgtcctgtcccaggagggctgcgctaggtctctcctctggctccccctcctcgggtcctcgtggctctctgtcgtgtgaagcggggggtcaggagcgcacaaatgtttatactccacgtgagtcacttgcacagatgacgggtgatgttttcctcgccaaggctgatggcaccgggcccctttgccgttccagcctcagtcacgcctccagtctgttagcatttagagttgctgaactttcgcattggtcaggggcgcgggcagcttgctgaccttttctgggagtcgtggcggacggagtggagccgtctgtctcgtcacagacaggcggggctgcggctggggatggccgccgcccactcgccctcagaatggccctcagcggggcttcctgacccctcagccccggtaggaagctggtgtgcactgcagggagaggcggcagctggaaaagtgttaaggccacagtggtttttccagaggctcgtctggaatgccgtggctggatctgagcctcctgacatccgaggcccctcttggtggggagagccagaaacccaagatactgccgtcagttaaagactcgaagttcacattttaaaaagtgcaaggagacacccggttttaggtacgttggggtgcaaggtctgaaggctggaatctgtggctcccttctttcagctctgtcatccctcttgtctgggtgctgcccacctggtagaaaggggacctcaccttgccactccactagcctgccaacaccaccaggaaggcgacccttcatcctggtggctccagtaaaaatcccagggaaggctctgattggatcagaagggccaagtccccatcccaggatgaatccctatggccaggggccctggagcctctgtccagtctgtgtcacatccatattttcagcccagcaatgggatctgcctgatctccaccactggggctgagcatagagaagaggaggttccagaggagaacagggggcccttatgagaagaggggagggatggtaaacaccccaaaaatgaagatattcatgacagaccccctctgatgctgaaatttgtgttgtctttggaaggtgctgggctaagctgtggagtgcctgcatctggcctggctctgctggggatgagcagtgccatgtggcagccccgtcccttctggggcttcaacacctgtcctgccagtggaggcagtggggtgggctgccttgcagcacgttaccaccccgacatgctagaattcagcagtgctagaatttcactgggtttccaagcggtgctctggagctgtgcagtcatgtacctacttgcctgaactgtggagtgaagggatttgctcattcaagtggtccctgctgccggcccaatgcagtgggaccaagtcgggggatgggctgtggcagaagcagtctcacctcagtgggagggaatgggaaagggaagcctcaggccgagacctgcccactcgtcagccctggatggggacccagctgggccatgagggtgaggaaagccatggcagagaaggctctggggtggaggcagcagaggtgctgagtgcagaaatgctggtgggctcaggagtgtggtggagggagaagggtctgagggcaagagggttggccactcagcacagagcacaacatgagcaaaggtccagagacaggatgtgcaggagagtcccactgagggcttcgcggtggatcctgaaggatcacatacactaggactcgggccaggaggtcttgtggggaggaacaagcagtgagctaagataagagttgggctccagcaggccaggtgcggtggctcccgcctgtaatcccagcactttgggaggccgaggcgggcagatcacctgaggccgagagttcgagaccagcctggtcaatgtgatgaaacctcgtctctattaaaaatacaaaaattagctaggtgtggtagtgggcgcctatagtcccagctactcaggaggctgaggcaggagaattacttgaacctgggaggtggaggttgcagagagctgagatcacaccactgcactccagcctgagtgacagagccagactccatctcaaaaaaaaaaaaaaaaaaagagttgggctccagcccagtgctgccacctgggagccatccacctgccacctcactcattcactcaccctcaaaccccacctccctggccagcagcaagctctctgcctccacagcacccctcccatcctggcttgtacctggaccacagtgttggggcgtccccatcagaacagcctccacgaaccaagggagcacccactttgtataaggccatcaactggggtggtgcagttctggttcctggctccgttgtcggcaggcagcctagaaaaggggcacggctatcatcccattttacagatggggaagttgaggcacagagaggttcaggggctcatccaaggccacacagtaaacaagaggcagagggacactaggtatggccagcagagaccttctttggccagtgcacaggtgctttttggccttttcatggtcccaagtgggtgggtcctatgatcatcaccatgatgcagatggggagactgaggctcagagggctgagactgctcaccaaggctctgcctgagcctggaggatgcatgtggagctaaacagcaggaagagcaagacaggggctcttcagggccggcccagcacaaagatgtggatttatctgtccatctatccacccacccttcatccaccattcatctatctgccacccactcactccttcttacccacctgttcacacctatgtccaccagttcacccacccacctgaccatccatacctccacctgtccatccaccccaccacccacccacccatccgcccacccacccacctgcccctatccacccatcttttcatcagtccacccttccatccacccacccatccacctgcccttccatccacccacctacccatgccacccacccttccatctacccacccacccatccatccacccatccacccacccttccatcagtctacccttccatgcacccacccatccaccctaccatctacccacctaggcacccacccacccttcacccacccacccatccatccacccgtccacccacccttccatcagtccacacttccatccacccacccacccacccttccatctacccacctgcccacccacccacccacccttccatctacccacccacccacccatccatccgcccttccatcagtccacccttccatccacccacccacccttccatctacccacctacccacccacccacacacccaccctttcatctacccacccacctatccatgcacccatccacccacccttccatcagtccacccttccatccactcaccatccacctgcccttccatccacccacctgtccacccacccacccatccatccacccatccacccacgcttccatcagtccactcttccatccacccacccttccatccatccatccacccacctacccacctacccatccatccacccatccagccatccacccaccctttcatcaggccacccttccatccacccacccatccacctgcccactcttccatctatccacccacccattcatccacccacccacccacctacccacccacccatccatctgcccttctgtctgtcacccatccatctgcccttccatccactcatccattaactcatctactgcccatccaggcacccttccatctacccatccacctgcctaccactatccatctaccaacccacccacccatccaccaatccactcatccaccatctgcccactcatccaccatctgcccacccatccacctgcccgtccagccacccttccatctactcacctatcactatccatccaccaacccaccatccaccaatcctctcatctaccatccgcccacccatccatccacccatccaccaacctacacacctgtctgtccacccatccacccaccctttcatccatttattcacccatccatccatctacccacccagctatccacccatccattcatccgtccatccgttcatccacccatccattaactcacctatacatccacgcaccctttcatccacccatccacctatccatctacccacccatctatccacccatccatccactcatccattcacccctccctccacccacttacccatccattcacccgcccatttacccatccactcaccgattcacccatctacccacccattcatctgtctatctaccgtttgcccatccacccactcatttacccatccatctacctgtccattcatttgactgctcatccacccatccagttgacaagcatgactgagctccaaccatatgttaggcatggcggtgagcaccagaacattacaggagacagaaccttgcctgctcggcttccatggggttcccctttcagccatggggagacaggctggaaacagatgatgtggcagatggagtgaggagcagggaagacaaaaatggcccaggtggggatcagggaggtggggtggctgatgagccgtagaccgaggctctcccagcgggacctggcaggcaccgccccttcatctgtagagtggggttccctctcttgcagggcggctggaggactagtggggtaaatccacattcttgcctggggccggccttgaaaagcccctgtcttgctcttcctgctgttcagctccatgtccatcctcccagctcaggcagagccttggcgagctgtctcagccctctgagcctcagtctccccatctgtgtgatggtcacgatcagaggcccacccacctgggaccggggagaggtcgaccagcacccgtgtgttggctgaggaaggcctcctttggccaagcctggtgtccccctgcctctgtttactgtataactttgggccagtggccgaacttctctgtgccttcatttccccatctgtaagatgggatggtagcagtgccccatcagagactgcctgccacaaggtgggccaggagccaagactgcacagactgggtgctccctcggtccgtgaagactgttctgatggagacgccccagcattgtcatctggacatggagagccaggatgggaggggtgctgtggaggcagagagcttgctgctggtcagggaggtggggtctgaacacccccttgtcttctgggcctttgtttggatggtggggcttcctcttgttggccttgagaagtggctggagtttggcaagtccgggatgggggcgctgtgcataatgtcttcctgtccattggccgcagtcagagccccacacatcctggactcctggtggcattggtcagaggctgggattagggcaggacatcacagcccggccttgagggcactgggcttatggtgacccctgaggagcaggtgaggggtggccacacgtatccatcatccacccacccatgcctccagcctccttcctcatctagaacacccccatgctcctgagatgacagcttgcaaaccactgcacctctaaccccctgttttctggaaggtttgagcaaggctcaggaaaggggaggccacgcagcttgccctggcttcatggtggggttggtgggggacctgcaggatgggggtggacgggcctcagctttctgctcccagctctgtgggcttcacctctcaacctgctgagcctgagagcagggagtgtctcctgccacctcactgggtccttggggtcattggtcgtggtcctttccaattgatcctcgattccgaaacctgcctgcctgccctccctgaactcccggtgtgacttgggcagcccgccaccctctctgagccttggcgtccctggccgtcacttggctgtctgggggtgccagccctgggtacagtggcctcctgctaggcactcccagatgctctgtctcctgtcattctgtccccacccagcaggcacagacaggctgaagccaaggacagacaggcagggaatggctccagatcaggaggctgggaggaaggggaaggccagggcctccttcgcaggggtcagagggcatccatgcaggacgctgtgtgagttgggccaacaggcgcaactcacggcgagccctgtctgcctcagtagcgcggggctcttggaggaggcttgagggtgggtgggtggggaggccgcgaggttagggtggctctgaccctgcctggcctgcccagcacgcctgccctcccagcacagggcgggagtggcgggttcctgtttgaaatgattcgtgaagatgttggagaaaatcagcatgtcaagcaggagggagacacagacagctgcaccctggcggcccctgagctgcagtctctgtctccctgtctctgagtctctgtccctctctccctgggtctctgtctccctgtctctgggtctctgtccttctgtctttgcatctctgtctctgagtctctgtccctctgtttctgcatctctgtccctctgtctctgggtctctgtccctctgtctctggatctctgtctccctatctctgagtctctgtccctttgtctctgggtctctgtctccttgtctctgggtctctgtccctctgtctctggatctctgtctccctgtccctggatctctgtctccctgtccctgggtctctgtctccctgtctctgggtctgtgtctccctgtctctgtcatgagacagggtcatgagagaaggtatcagtgtggttggagtctctgtctccctgtctctgggtctgtgtctccctatctctgagtctctgtgtcttcatctctgggtctctgtctccgtctctgggtctctgtctccctctccctgggtctgtgtctccctgtctctgagtctctgggtctctgagtctctgtgcctccatatctgggtctctgtctccctgtctctgtgtctctgtctctgggtctctgtctctttgtctctgttgccatctctgtgtctctgtccctctgtttctgggtctctgtctccccatctctgtccctctgtcccagtctctgggtctgtcagtggctgagtgtcctggcctgctgggacactgcggtggggccctgcacccgctcctggctctcccacttgtccatccagaagccattatctttcctccactcccacgggagccaagggaggcagagaacagcaggtgccttggaaggggcggccccttatcaggagggataaccccaggaagtagccttgggcagtctgggggagaagcagggcggccgggcctcaggggcctctgagctgtcccacgggaaagcttgctgacgtgagcgtgggggccggagcgtttgagggccagcatgaggtgccggaacccagcaactccatcctgtgggctgggagcagttcccagtgctgtgaaacattgtggtcaccatggcaacagtactgggggagctgcctttgtggaatgggtgggaccctgcctctttgcaccttttaccctcgaggcacgtgcccaagagccagtgaggactgcagctgctggtggccaggggtgggggtggcgggggagcaggggcacgctgggccgcggtgttcccatcttggagagggatactgagcctgtgatctccccggctgctggggatttgtgaggctgcatgtgaagacctgtgcctgcttggcaaggtcagagtgggtgggaagggtcatgagagaaggtgtcagtgtggttggagagtagggtggtggctgtgaggctgagaggttggtggtgggattccaggccccccacagctctggcactcgagccccacaccacctcccacactgcctggtcgctgtcacccccacccctgccaccatttctgcttcccttcctttcactggctctctgttcctctctccctgtatttctctccttgtctctctgggtctctgtctccctgtctctgggtctctgtctctccctctccctctctccctgggtctctgtctccctctctccctgggtctctgtctccctctccgtctctctaggtctctgtctccctctctccctgggtctccgtctccctgtctctaggtctctgtcttcctctctccctgggtgtctctttctctccctcttgctgggtctctctttccctctccctctggatctttctctccatctccctctctctgggtctctgtctccctgtctccctgtctctaggtatctgtcttcctctctctctgggtttttttctcctcttgctgggcctccgtctctccctctccctttctctgggtctctgtctccctctctccctgggtctctgtctccctctctctgggtctctgtcccctctctctgggtctctgtctgtccccctgtccccctctctctgggtgcctgtctccttctctctgggtctctgtctccttctctctgggtctctgtctacctttctctgcgtccctgttcccctctgggtctctgtaccctctaagtctctgtccctttatctctgaatctgtttttctctctctgggtatctgtccacttctctctgggtcctgtttttctttctgtgggtcccggttcttctctgggtctctgtcccctccaagtctctgtcactccctctccgagtctctgtttccctctcttgctggatctcagacaaggctctcaggatggtcttggtccagttgccagcctgggactggctgggagagaggctagggattgggcagtggcttctcagccggccctgacatcccctgctgtcccctgaagtacagcctcttccccacccatgcactgagaccctggggcggcatcgcatcagccggggtgggagccaaccagctgtgctgtgctgctgtgctccttcgagccacatggacaataaaaccaaaattggctttgaaagtggaagtgctctcctctttgaggggaagtgagggactgcgcgcgtcagaaccgcctatgaggggcaatgccggcaggctccgttctggcccgagcgctgggctccgcgtgggggtgggaaaggattttacaaaaccccaaagaaatgtttccatgaaattctttcttgttcttgccttttttttttcttttttggacattccaatgaaaagaaccgttctggggctttggatcgcttctcatgggttgggaagccgaccatggagatgaggccagcccggggccggaggaggggcgcctgccctgacaggtgcgtgcccctcactcttgtccccctaggcagcccccacctccctctgctcctgatcctcccacgaggcttcatccctagggtgcctggccgcaacctctgcaactctgagcttcttgtgacctcccccacgaggccatcgtgccttgggctgggttcccccagagcagactctcaggcgggggttcgagggccccacgaaagaacagcgtggggagggaaggagcctccacagggtgtgtcagtagtgagcaggtggtcccagggcaacccttggagatctcgggaatcccataacaggtggtccacctgggggagtttaccccacccaggctccctggatgttagccctagcacatccctgcactgggacatctgagaggagcaggggtggtgttgccagggcagacctgggcgtgtccttgggtccagcacaggcctgggcctggctagggtgcccgatgacattgctggggggatacagcggcaagcgggtgtcagaatggcccctagcccgggccaggcctgtagcgggggcgtgtggccactcagaggccagattcgggcagagggtgcagccagggcgggcagcaatggcctcttgagacggccctggccggggctgctgacgcattggctccgatgactcacgtgcgggtgaccgtcactcgagtggccgtctggagactcggaccggctcagggccaccgccttcctgggggcctgtggccccgccgtgccggccgccccctgtctggaccagcctgagtaatgggtccttcccctcctcccagtggccggctggagaggaccttagtcatcagccctggccccggccctccctcctccgcctgcccacctccgcccaggctgcgtctcgcttctccgtccaggctgggggactcctgcccctcctggcctcctccctccttgagttccccaggaggggctgcagtggggtgggtttggcttcacaggggcggcagtgagggtgacgtcaggggcctcagggacagttgtcccatccctaagatgagaggaaggaaacagccatgtggaacgcgtcaggcatcaccagggcatgaggaggaggcctggggaggacaagctgcttcctcccctctttggtccagcgtgggccctgtgccctgtaaccagcagtggatgggcctcaccctgctttctgggcctggggtgtcctaaattccagatgggagcatccagattctccgagtgtgtagtcgtcacgtgctagtggcagcctgggtcccagggctctgcgtttgctcatctcatcctccagcggccctggggctggggagctggatggtcatttgcccctgctttgtagctgaggcctgggtggttgagtgactgctgagttcccagctaaccagagctggcttggcccaggctgctggcccctgatgtctcctctgagatgccctgccagtcagctgaactgatcctgccttctgggttccgggcaccctctctgcttgctggggaacccacagatcccatgtttggaacactggcccacctccctggtttcctgttcctcagtcatcagagtagcagggtgcagggcagtagctcctctcctccccagagggaggtcctctctgtccaacttctcagttctccagatatgttctgtgcactcatgggcagatgcatatgtgtggcactttgagcccaaatagcatcccactgtgtgcactctgcctcttccttcctcctgcagccttgacgtcatcccctgcatgcaacatcttccccaggatgcgtcagcctcctcacccatctatagggcagccctcactcagaaggtgctgtgattccacgaatctcctttaagggtggttagcttatttctcgtctgtggcccctagagattgtatttgggtaagtttcagaaatagagttcttgggtaaaggacatgagcctttagagtgttgctgagtctacgcagctgccttcctgggggtcaccttgcttcataagccccccgagagtgtgcttccctgactgcaagcgaggctgactcttacgtccttctagccagctctgcttgctttcctgggaaccattagcccacattctttgtgcatctttcgatctcactctgtcacccaggctggagtgcagtggcacaaatatggctcactgcagcctccacctcccgaactcaagtgatcctctcacctcagcctcccaagtagctgggaacacaggctcatgccagcatgcctggctaatttgtattgatttcttgatgctctttatatatggaagagcatggtaaatatgctcctaaggactgagtggccccgtggtgaacttgtcccagtgcaacgtgtttcttctgatgaaaatgtacacatgcacacctgcctccaagggctttacaggaggcacgagaagtcctcccatccctccccgcaaatctccttgaacttctaaggaaaaaccagaccaaaatcaaaatggcaaaggctggcaaggcccatgcatacttctgggagacaaagtgtccacagaaaggccggcaggggtcacccagagcccgaatgcacaacccttgccacagctgcaacacaaagctgattctgggtgatctgaccccttttggtccccattgcctggaccgcgtgcccatgaggacggggcctacttcgtctcatttacgcagcatccctgcatgcacgggcagggaagaggagtttgcaaagccagtgaggcaaactggggacaaggagagaccttgagggtcctcagaggcacatgcaggatgcggctttggccccaggcagcctggacacccgtcgcagggtgtcggtgagagggcatgccattcgtgggaagcaatgagaccctgccctggagatgtccaggcaggtgctggacccctgtggggggctggataggggagagcggcccatgagcctgcgacatgctcctcacaagcctcggatctggatctgtcatgggtctagggaaaaaagagccaaggcttggctcagggcagcagcctggtcaagtgggatcggggccgatgtgtggggaggggaggaagggaggaggggaggtaagcgtcccttccacttggcaggggaaaggccacggggacaagccagagtctcagggtgcacctggacccctttccttccctgccctcctcagctttcaaaaggctgcacccccaccctcccaggcaaacaccaggtctgggctccagcacccccagcaccgcagcattgctggccagcccagatgaccgtggcattgggctctgagtagcatatgtcctgcttccccagggactcaaaggctttccactgagcacaggccccacactgggtccttcgtgctatgtccccaccctctaggacatgcagtgcctcgcaggcagggctggggcttgggcaacttctctgcctgtggtgccttgcagggctgtggtcagcgcctggccctgaagcccctctccccggcagtttgtcttgatcactcaccctttcccaagggtctctggaagggtggtctgaaggggaggtcagggacctccggtggcagctgctatgttgactgagtgcccactgtgtgccctgtgtttgacgttggctctttaatgcccactgtggttttggggctggctggcagtggggccaaggagccttccgtctcctcccgctttcttggaaagatcagtgcccgcattcctggcctttgcttacaggcaggcgtgggtcccaggaatgggagagcaaattccagagggcagaggccaccaggacagagcagggtgcctcagcccggtgggggtgggggtcttagaggggactgatcctggaggtggcaccagggtccaccccctgttgtgttctgaggaagaagtggtgtgttaacggctcctaagctattaattcattgatccgttcaacagtttccccaaatgaaatagcaaaggggtggtggggctggagaagaggggatgagggggcagtaggggcagtgggggctggaccacagagggctcgtatactctggggtgcagggggctgtggcggggcttgcaggggacttgagaaggctcccgtgtgtcctttggtttttttattgaagtgaaattcacgtgacataaaactgtctgaaagtggacaattcagtggcatttagtagattcacagtggtatgcaaacaccacctctgtctagttccagaacattctcatccctccaaaaggagaccccaccccatcagcagtcactcccccctcccctcccccagcccttggtggcacccatctgcttcctgtctctgcggatttgcctgttctgggcatttcacgtcagtggagtcatacacagtgcggccttttgtgtctggcttcttgcactgagtgttgtgttcaaggtaatagtgtgtgtgtgaacctctgggccatgtccccacctctgctttccccgcagcacggccgacaagaacggggccctcaagtgcaccttctcggcacccagccacagcaccagcctcctgcagggcctggccaccctccgcgctcagggccagctcctcgatgttgtgctgactattaacagagaggcctttcctgcacacaaggtcgtcctggctgcctgcagcgactacttcaggtaagtgctggccccaggcagctggaaggggcggctgcctgttgggacagggacagggcagatggcacccactttctaaagggggcctgtctcagcgctacccagggacagcttcgagggagaacggctggtaccggctgctctttttttttttttgagatggagtctcgcgctgttgcccaggctggagtgcagtggcacaatctcggctcactgcaacctccgcctcctgggttcaagcagttctcctgcctcagcctcccgagtagctgggagtacaggcacccgccaccatgcccagctaattttttttgtattttttagtagagacggggtttcaccatgttggccaggctggtattgaactcctgacttcgtgatctgcctgccttggcctcccaaagtgctgagattataggcgtgagccaccgctccgggccccttctgattttagagagaggtttaatgtccagtaaacctgcaggtttcccggagtttgcatcttactctctttgggcagaacatgcctggagggacagagatggcctgtgggcacccactcacttctaccctgcatgcagggtggcagggcttggccaggtttttgatctgttttgttttttttttttttgagacaaagtctcgctgtgtcgcccaggctggagtgcagtagcacaatcttggctcattgcaacctccgcctcccgggttcaagcgattctcctgcctcagcctcccgagtagctgggactacaggcgcatgccaccacacctggctaattttttgtatttttagtagagacggggtttcaccatgttagccaggatggtcttgatttcctgacctcatgagccacctgcctcagcctcccaaagtgctgggattacaggcgtgagccactgcgcccagcccaatctgtctttacttgacgcctgctgtatgccaggcactattctagtccttgggatgcagcagggatgacagtgaaatgggcacaagcccctgccctcagggcatcccctcaggacacctggagcaggacagctgggggactggaggggcatcgagggccgcagagaccctgtgtctgccaacaccatgtcctgggctctgtctgaggcccagatgagttctcctccctgtctccctgagctgtgggcacttccccaacgtgacagaagaggccatggcgggcactgtctgtctgtccctgtgccgtggccgggccggaagtgagagcaccacagagcagggctgtggggtggggggtgctttctcctcgccagctgggggctgttgcagggctgagtggtctccctccctgggtgaccagcaggtgagcctccttcctgccaggtggtgaccccgccagagagagctgggccgccctggggaggctcccaggccccagcccaggtgtgccgctcagccacacattccccgaggcccgggccgcctgccccatgggctcaatgaggctgttgtgggggccgcagcagccgagccaactggggcgccgcttctatttttattctggatttggggacgggtgggccagcccagccagcaatgccctttaaaggctcccctgtgctggcactgcagccagcgagaccttaaaaggcaaagctccctcctgtcgcctgcgaccgcctctgccttcatcgcatcatgcccgagggccagcgtggacccgtggggacaagcggggcagggtctggggagctggcagcgtacttactgctcctggaccgctcagagatgctgaagagctgcttgttgggcagatgtcagtgggcggccccgagatagtgccctggcagctgtccttgcccctgtagccctgagcctggctcacaggaggtgcaagactaggggacaggcctctgtgggtcaaatgcacaagggatgttccctcctcctcggacggccatcaggggaggtgcactggcaggagtgagagttactatgccatgccattgcgcctcctggaaggaaccgcccattcccctggagctggggtgctctcccctcttctgctggggaacaccctaaacgctgtaggggaactgtgacctagaaccgtgtgcctccccgctgccctccctcacgggggcctgtgtcccctcccactctcatgttctgcctcgcagagcacagcagtacaagggcggagctggggtctcaatggaggctggggacgtagctgttgggtgggaggtgcttccccgaccacctgagcctgtctctggagacagcagtcaccccagcacagcctcctggtgggggctccattcctggggaccctcattaccttcccctcttcacatgatggttgttgagactcaggctgggcatatcagagctgcctgcttaggtcagtgaacaaggtgagggttgaactgtggtgcatggcacctccagagcactggccttgcagttcctgagctcaggtgtcaagtggggctgcagatctgtccccagagccacagggtgtgttctcatcctgcactgccatacctggcccctctaaccgcacccccgacaggcacattgtgggtgaggctgacccgggccaccgctcctgcagctccaacacgatctagtcatgaaggggcaggggcagggtcctctgcagaggggccaagcagggagttgctatttataggaagatgcatggcttgggtggattcaaaatctttttttttttttgcatgttttttttgtttgtttgagacagagtctcactcttattgtccaggctgcagtgcagcatgatctcggctcactgcaacctccaggttggtcttgaactcctgacatcaggtgatccacccacctcggcctcccaaagtgctaggattacaggcgtgagccactgtgcctggcctttgcatgtttttgtttgtttgtttgtttgtttgtttttgtgactgagtctcactctgtcacccaggctggagtgcagtgccagtggtctcgatctcctgatctcatgatccacccgcctgggcttcccaaagtgctgggattacaggcatgagccaccgcgcccggcccctttgcatgtttttaatgagcattccgcctactttcctcttgctggctgtgccctgtgttctgtgtccccaggctactgttccccaggccagatcattcctggctggccaaaacacccctcagccactgccagccacacgttgtgtttctgcccttcagggccatgttcaccggcggcatgcgggaggcaagccaggacgtcatcgagctgaagggcgtgtcggcccgtggcctgcggcacatcatcgacttcgcctacagcgccgaggtgacactggacctggactgcgtgcaggacgtgctgggcgcggccgtgttcttgcagatgctgcccgtggtggagctgtgcgaggagttcctgaaggcggccatgagcgtggagacctgcctcaacatcggccagatggccaccaccttcagcctggcctcgctgcgagagtcggtggatgccttcaccttccggcacttcctgcagatcgccgaggaggaggatttcctgcgcctgccactggagcgcctggtcttcttcctgcagagcaaccggctgcagagctgtgccgagatcgacctgttccgcgcggccgtccgctggctgcagcatgacccggcccggcggccgcgcgccagccacgtgctctgccacattcgcttcccgctcatgcagtcgtccgagctggtggacagcgtgcagacgctggacatcatggtggaggacgtgctgtgccgccagtatctgctggaggccttcaactaccaggtgctgcccttccggcagcacgagatgcagtctccgcgcaccgccgtgcgctcggatgtgccctcgctcgtcaccttcggcggcacgccctacaccgacagcgaccgctcggtcagcagcaaggtctaccagctgcctgagccgggagcccgccacttccgcgagctcacggagatggaggtaggctgcagccacacgtgcgtggccgtgctggacaattttgtgtacgtggccggggggcagcacctgcagtaccgcagcggcgagggcgcagtggacgcctgctaccgctacgacccccacctgaatcgctggctgcgcctgcaggccatgcaggaaagccgcatccagttccagctgaacgtgctgtgcggcatggtgtacgccacgggcggccgcaaccgagccggcagcctggcctccgtggagcggtactgcccccggcgcaatgagtggggctacgcctgctcgctgaagcgccgtacctggggccatgctggggccgcctcagggggccgcctctacatctcgggtggctacgggatctcagtggaggacaagaaggccctgcactgctacgaccccgtggccgaccagtgggagttcaaggcgcccatgagcgaaccccgcgtgctacacgccatggtgggtgccggcggccgcatctatgccctcgggggccgcatggaccacgtggaccgctgcttcgacgtgctggctgtggagtactatgtgccggagacggaccagtggaccagcgtgagccccatgcgggccggccagtcagaggccggctgctgcctgctggagaggaagatctacatcgtcgggggctacaactggcgtctcaacaacgtcacgggcatcgtacaggtgtacaacacggacaccgacgagtgggagcgggacctgcacttcccggagtccttcgcaggcatagcctgcgcccccgtcctgctgccccgggccgggaccaggaggtagcccccaagacccccgggaccctggcctgaccgcatgttgtctccaagtggggcttggcgaatgcacgtctgcctgagaaccccagtgccccccttcgcccgggctgcccttgaggggcctgctgcgttgataagcccccctcccaggggtccctccctccctccttcccaaagcagatcctggctgcgagtccatccgagggagcctgccggcaaagcgtctgacatgtggtggcagcaaattcgtccccggggtggtttcctcgcctggcccccgagtccccacgggctggcgggtggaatcccaggtctccagggggtccctgtgcagctccatctcacttctctactgcctcccagccccacggtttcaggcattcagatgtgagctcatcaacattgaacccaaagtcggtggtatatgactcaccctccttccaagtctcctgcgcgcgtgtttttaaaataaactcacccgaaacgtccgtaacacacggacctccaggagcagtgagaggtggcttagaagcccctggtttggggtgggtggaggaggagggcacgtgtctgcctcccctggggtgccctccttcccccatcccaagctgctgaggggaggccctggtcatgcctcagttcctgccttcatctgctttccggaggaaaaaccatatcaactcctagaaacgctccttaggggcttgggaccttccatttggcactgagcatcttgtggggccttaactggctgagacatcccggccctctacatttgccctgttggccaggcagtccccttcccgcaattggagggcgacgctaacttcagaatcccatagtggcgcttgccgcaggtctggtggggtgtcttttttctcctccctcctttccacccctccgcgccctgccactccctggcctgccctgtttttgggtcaacattgctacggagccagcagtgaggcctttcccttcaagggctctgtggtatctctggccacatttgttctaatgtctgaacctctaaatcttttctttttgattggttttactgtttttaagaagccagcactgctgtctcatagatgggatttgtactcttggggcaacttaaagtgtctctctcgctgctaacagacgattgatgtcttgtctctgtgacccactcaccatgtaaagaattaacctcctatcttagcagacatcgtctcctaatatttccctttatttaataaaaatgttatggtgaagagatggagccggcccagcactgagcttgtgcggcttgggtctgattggtcacagattcctcgtgtgtcctccgcgtgtctgggggctcctctcccccgcctcaaccttttccagcctttcagaggagtcggcagtgggctgggctttggctcaggggcgcagaggcagcaggaagcgtggccaggactttcaccctggcgttttttgttgttggtttttttgtttttttgagacggagcctcgctctgtcacccaggctggagtgcagtggcgtgatctcggctcactgcaacctctgcctcctgggttcaagcaattcacctgcctcagcctcccaagtagccaggattacagacgcagacacacaccaccacacccggctaatttttgtatttttagtacagacggggtttcaccatgttggccaggctggccttgaactcttgacctcaggtgatccacctgcctctgcctcccaaagtgctgggattacaggtgtgagccaccatgcccggaccaaccttggcactttggaagagccttcagccccctattctcatcatggccggccaaactatgaactgggctgcccagagcaggccacttatcagttgcaggttagcagagaaagcctgatgttcccggacggccttcccagaagggaggccctgggatatcacacacacatggatctccataagttgctgtgcctgcatgcctggcgctcctgtgtggcagccatcggggctggggtaacactagaggctgagggggtgggcagtgctaaaataggaacatggttgggaacctaaaagaagcccacactgtcaggggcatcgagacaaaagccgagttccctggggacttaccagaacattccagccccacccccgacctgagctcccccaaagagaacccttccccactggaggcatggccccttcaggggagcagtgagaagctttgccagctgcaagtcccctggatcagctcacacctcagaacatcttgtccccagtgagctggcaggggcgccggcccagggcggggggcgctgctgtatctaaccggatcgattgtgcataaccgtctaggccggttcgtggaatgttcgtggggccccctgcccctccctcagcctccccccgcatccccccaagaaaggaaaattatttttcgtattgtaaactttaaacatgaaaaagctgtttttaatttagcagaaactggcttgaatcttcactttgtgaacgtttgtgtccttcagaggcagaatatgcctgcgcacactcgcacatgctcatgcacacacctgcacacgcatgccgcaacacgcacattcacatggccgtgctcgtgcacgcctgcacacgcatgcttgcccatacccacgcattgcagcgcgttcacacgctcacccgcacacagtgaaacacaagctcacacatatgcacacacacacatatctgtgcatgcacccctggaccagcgtagcccaatctgcctggcggcccaaaggggtctggagcccggcaccgccccgagcctgggggaagcctgtctacttccagatgccctgcctactcgctgaggcctggacgccggctgcaggagcctcccttgcacctgggctcaggctgtgggaaaacgctgtctctcgggacggtcagatgcaggcccgcaagagggaggccaagtgcgacttctggggcctctcagcaagtgagggccaagggggcctctggggagccgtgtgaggtgggaatccgccccggacctggccagcttggaaacctgcccctggctctgtctccgaggaagcagctccagctcgtccgttctcacgggccctggagattcactttgcacggtgcagcctcggaccctgctcttcctcggggcgcctgaccgtggatctcagcggcctggcgcctaacacagagcctggcaccgacggagcatagctcgaatgtttgctgcacaaaggagaggtgctggggcgggaaggtgagggcagccttcttcacactagtggccgtgggcaccttctgtgtgcaaaccccggggaaaggagggcaccaagccgtgctccacccccagcaaggcccctgctttgttctcgtcttcctgtcgctctcattctggtggccagccgggcagccattcctccctcctcaccatcagatccctgatttggtgccagcagcaacgtgcccagcctctggggttaagattcagctgagccgttcttggcaatgccttttgccggggttgtttgtaatctgggcgtgtttcccagctctggccagcaagcttgaaggggtcgggtgtttctggacaagggagagagaggccttgttgcccccttcccttccttactgcttcttatgaggacacaatgccaggggcttctgcagccatcttgtggccaggaggagcaagttaagagagcacactcaggctgggcgcagtggctcacacctgtaatcccagagctttaggaggccgaggcaggagggttgcttgagtccaagagttcaagaccagccctgagtgacatagtgagaacttatctctacaaaaaaaaaaaagctcgtcagggtgacacacgcctgtagtcccagccactcagggaggctgaagtgggaggatcacctgagcccaggagttctaggctgcaaggagctgtgattgtaccactgcactccagcctgtttttctgagcctggttttccagccttctcatcacttctgtgagctaccaaacaattttttttttttttttgagacggagtctactctgttgcccaggctggagtgcaatggcaccatctcaattcactgcaacctctgcctcctgggttcaagcgattctcctgcttcagcctcctgagtagctgggattacaggtgcatgccactactcctggctaatttttgtatttttggtacagacgaggtttcgccatgttggccaggcggtcttgaactcctgacctcaagtgatctgcccaccttggtctctcaaagtgctgggattacaggcgtgagccaccacgcctgggcttttttttttttttttttttttaaatagagacagagtctcactatgttgtccaggcgggttttgaactcctgggctcaagcaacactcctgccttggcctcccaaagtgccgggattagaggcatgagccaccatacctagccaaccaaccagttttgcaatacacacattggctatttaaattgtccaggctggatgcagcggctcacgcctgtaatcccagcactttgggaggctgaggcaggcagatcacttgaggtcaggagttcaagaccagcctggccaacatggtgaaaccctgcctctactaaaaatagaaaaattagccaggtgtggtgattaatgcctgtaatcccagctactcgggaggctgaggcaggagaattgcttgaacctgggaggtggaggctgcagtgagccaaaattgcaccactgcactctagcccgggcaacatagcaagactccatctcaaaaaaaatttaagtaaataaattgtctagagtcagtttctgttgcttacaagtaaaaaccctgacatgagatgggaatactccagcatctgtcacatttacattataattttggaactgcttggtgacaagcatatctggccattagtgttttctgcagtgcagacattatttctcataacaaggagactggaggtcagaggtgccaggatgttatgactggtggcccatgatttctgggagggggcatgactatgcctctctctttctttctttctttatttttttttggtttagagactgtattcccagcactttgggaggctgaggcaggcagatctcttgagctcaggagttggagaccagcaacacagcaaaaccctgtctctacaaaaaatagaagaattagcctggcatagtggcatgcacctgtagtcccagctacacaggagggtgaggtgaggataggttgagccctgaagatcaaggctgcagtgagctgtgattgtgccactgcactccagcctgggtaacacagtgagaccctgtctccaaaaaaaaaaaaaaaagaaaaaagaaaaaagtaaacaagggaatcaaaggcgtgaggcaactaggccttcagctgaaattatgccagaggacgatcctgccaccactgcagaatccagacgcctccgttggcactgccatctgccctgggcactcagccacagctgcccctagaaaacagatggccctgccccgatgctgtttctctgtagcacttgtgcctgcatggaaacatcccggaggcccaaccagtatcccacgccattccccagctgtcccaggagtggtgaaagtgagtacattcgtgtgtattagtcagccactgctgtgcaacaaacacccccaagtctcaatggcatgcaacaataagcgtttgtttttcacatgtctgtgagtcagcagaggtggtgtctgctctaggcgggcctcggctgggcagctctgcttacaggtgcaaggatgcagagtagcccagagtccctgctccacgggttcttgcctcctgctggaacagcagctagccagggcacattttcctcctgcaagtgtctgaggacaagtggaatcacgtgaggcctcgtagggtctcagttcgggactcaaacactatcacatctgcccgtaagtcttttttttttttattttgagatggagtcttgctctgttgcccaggctggagtgcagtggcacaatcatggttcactgcagcctcgacctcctgggctcaagtgatactcccaccttagcctcctgactagctagaactatacgctcatgccaccaagagcagcttattcatttatttatttatttgagactgaatctcgctctgtcacccaggctggagtgcagtggtgcaatctcggctcacagcaacctccacctcccaagatcaagcgattctcttgcctcagcctctcgagtagctgggattacaggtatgtgccaccacacctggctaagttttgtatttttaatagagacggggtttcgctttgttggccaggctggtctcgaactcctggcctcaagtcaaccacctgccctggcctcccaaagtgctgggattacaggcatgagccactatgcctgacctgcccataagtctttggccaagcaaatgacatggctgagccccacatctggaatggggaagtgtcttccacctggaaggaagaactgtagagggcagggatgcaggaataggtgggaaccgcggccaatagttcgatgggtcacccttggcttgggggcctctcttgttagcagggtgaccaacttccctctgtggggggactccccaaacttggatggggaccctgatgctggcaaccaaaaagaaaggcccgttctgcatctccttagcagccactgccccctggaggtcgagatatccctcttttttgtttgtttgtttcaggtgagtgggggctgtgagtgccccaggatcttggaaagcaggatgggggtctggatgtagggaggtcaatggggccttggccaagtttcagggcatggacactgtaggtgtccctgggagcatgcccaagtctctctatgttgcccaggctggtttcaaactcctgagctcaagcagtcctcctgcctctgcctcccaaagtgctgagaatataggcacaagccaatgcatccagccaaccaaccagttttccaacacgcacttcagctatctatccctcagcacaagtggctgggtccctagacttgaaccatgggtcccccgcctgcccagttccagcctctcactaccctccttggcggcccaccccgtcccaccctccatccaccactaaagcctgggtgggaggacgaggggcctgggtcctcctgtaaccttatcgtaaggaggggcatcgctggcttctcttgggtcctttccctctctcttcatgatcagacccagcttttgctttgccctttaaaaactctgtacgatgagagcctcttttggaagtcaaagacagaccagggattgttttcctctttgcctctcagctccaatggccctaattcacctccacacgacgtgggtaccccaaatcgactaagatcccatataaggaagagctgagaagcaaagcatgaaaactaacatggcgaagtagcgttttgctttcctaacagttgctgagtgcttggatgaagcaggcactgagctaagtgctttccatgtgttatctgtttcatctttccaagagcctgctatgaggagcaccactgtccacatttagcagaggagggcagtgcggctcagagaggtgaagacagttttccattgtcacacagcttgacaactgataagtgttggaccacacagaaatgctcaagagtttcttgatctcccgggtcaagcaattctccttcctcagcctcccaggtagctgggtttacaggcgtgcaccaccacgcctagttaatgttttttttgcatttttagtagagacggtgtttcaccatgttggccaggctggtctcaaactcctgacctcaggtgatccgcccacctcagtcccccaaagtgctgacattacaggtgtggaggtggaggttgcagtgagccgagttcgcgccactgcactccagcctgggtgacagagcaagactctgtcttaaaaacgcacaaacgaatgaacaaaaacacataagaaatcacgtgtgtctgtgccctttccacattccacaggcacacagggaactctggcctggccctggcctctttgggaaaggcgaacataatctcagctcaatctacaagggatcagatgagaccgcacaaacagctgccttcagagaatgggatgtttctgggtcatgggaagagacgctggaggtccacttcagctagacccttcaggagggtctctcagagcagaggcctgcaagtcgagaaggagccagccacgaaagcatcttggaggagcgcaatccaggcagagggaacagcgaagaggcccgtgtggctggagcgagagccgagccgagcataagcatgtggagccgccaggaggagggtattttttttttatttgagatggagtctcactctgtctcccaggctggagtgcaatggtgcgatctcggctcactgcaacctccacctcccgggttcaagcgattctcctgcctcagcctcccgagtagctgggattacaggcacccaccatcatgcctagctaattttcatttttttttttttttaagagacggggtttcaccatgttggccaggctggtcttgaactcctgacctcaggtgacccacctgcctctgcctcccaaagtgctgggattacaggcatgagccactgcgccaagcctttagattttttttttttttaagtgcgatgggagtgtgggatctgccctgctttgcaaagcccgcagggctgctgtgaggagcagtgttggaccacactgggtgacagcaagttcctttgatgaaggaagaaagtgaaaacctcagggttggtttctgcccgggtcactggacactgaagcctcgcccttctcagggctgggggtcagtggagcaagaagcggggcttgggctgctgtctggccattgcacaatgagcgggctggctgcttcctctgactcatcaccagggtttaggatggatcaagtttcatgccaggcgggccgcggggtgaatgggggtgagtaggaagagcagcagacttacttctgcacatgcccaggatggctccttgctgtaacccctgctagtccccaaaatcttttctcttccatcttcctgtgtctggaaactggcttagtgcagatatatgtaagtgatcagggtaagtggcatttatggagcacctcttagtgagacacatattaacatatgttaacatactaacatattaacgtatgttgacacatacgaatttcatttaaagcctacagggccaggtgcagtggctcacgcctataatcctagcactttgcgaagccgagccaggaggatcacttgaggtcaggagttcgaaagcaacctggccaacatggcaaaaccccgtctctactaaaaatacaaaaattagccgggtgtggtggcctacacctgtagtcacagctactcaggaggctgaggcaggaaaatcgcttgagcctaggaggtgaaggctgcagtgagccgagatctcaccactgcacgccagcctaggagacagagcgaaactccatctcaaaaaaaagaaaaaattagctaggcgtcgtggtacacccctgtaatctcagctactcgggaggctgaagtaggaggagaattgcttgaaccagggaggcggaggttggaagttgcagtgaacagagatcgcaacactgtactccagcttgggtaacagagcgaaactgtgtctcaaaaaagaaaaaaaaaaaaagatacatgtaattgattagggtaagtggcatcaattacggagcacttcttagaagtaaggcagttgacacttattaacttcatttattttatttatttatttatgtatttttttgagatggagtttcacttttgttgcccaggctggagtgcaatggcgcaatcttggctcactgcaacctccacctcctaggttcaagcgattctcttgcctcagcctcccgagtagctgagattacaggcatgtgccaccacgcccggctaatattgtatttttagtagagacggggtttctccatgttggtcaggctggtctcaaactcctgacctcaggtgagccgcccgcctcagcctcccaaagtgctgggattacaggcgtgagccaccacgcctggctaacttcatttaaagcctacaaaactcagtgtgtgaaagcagctgaggtcggctgtgaggcctgagttttggtgcataagttgctagggcagctgctgtccctgctctctgtctttatttcttctctgacctcacaggatgctgtcaagaactagaagccggtcaggcgtggtggctcacgcctataaccccagcactttgggatgccaaggtgggagtatcatctgaggtcaggagttcgagaccagcctggccaacatggtgaaaccccatctctactaaaaatacaaaaattagctgggcgtagtggcgcacgcttgtagtcccaggtactctggaggctgatgcaggagaatcacttgaacctgggaggcggaggttgcagtgagccaagatcgtaccactgcactctagcctgggagacctagcgagactctgtttaaaaaaaaaaaaaaaaaaaaaaagaactagaagccacatatgtagcgggcccagtctcgcattggactcacagaagctgcagtctcagtcagaaccaggaacagaaaaaggacttgaaatagatttaggcaggccaggcacggtggtgcacacatgtaatctcagcactttgggaggctgaggggggcggatcacttgagcccaggagtttgagaccagcctgagcaacaggatgaatcctgtctctacaaaaaccacaaaacattagccaggcatgatgatgcacacctgtagtcccagctacctggaaggctgaggtggggggatcacctgagcctaagggttggggcttcagtgagcatgatcatgccactgcactccagcctgggcaacaaagtgagaccctgtctgaaaaaacaaacaaacaaacaaacaagaaaacaaatagacaagcacaaaagggaataaatttttggcctacataacttaaaaggcaggtgagtctagcttcaggaatggctggatccagaagctcaggctggagtacagtaatgtgatctcggctcactgcaacctctgcctcctggattcaagctgttctcctgcctcagcctcccaagtagctgggattagaggcatgtgccaccatgcccagctaattttgtatttttagtagagatggagtttccctatgttggtcaggctggtctcaagctcctgacctcaagtgatccacccaccttggcctcccaaagtgctgggattacagttgtgagccaccgtgccaggcctggttctgttttcctctgtgtgggtccactcttttggcccagctgaactaatcttttgtttttttttgagacaaagtctccctctgttgcccaggctagagtgaagtggcgctatcttggctcactgcaacctccacctcctgggttcaagtgattttcctgcctcagcctccccagcagctggaattacaggcgtgtgccaccgcgtctggctaattttttttgtatttttagtcgagatggggtttcaccatgttggccagtctggtctcaaactcctgacctcaggtgttctgcccgcctctgcctccaaaagtgtagggattacagtcatgacccagcgcccagcctgttttttgtttgtttgtttgtttgtttgtttgagacagggtcttgctctgtcacccaggctggagtgcagtgcattatcatagctcactgcagcctccatctcccaggctcaagcaatcctcctgtctcagcctcctgagtagctgggattataagcaggcatcaccacgcgcaggtaatttttttatttttagtggagattaaatctcgctatgttgcccaggctggtctcaagctcctgggctcaaatgatcctcctgcctcggcctcccaagttctgggattacaggcatgagccacaacacccagcctggcctgaaccaatcttgatggccagcacaatgggctatgctgattggccaagacttccaccttagggaggggtgtttgtgtggtgggagagtggtgagaccagccattcacatctcacagactgaaagtcagaaccagtgttccccaaataagggttgttgacactaaaaagttgagggagtgggtggggttgagagaaggaatatgcttgttaggcaaaaagtataggagcttaccaaagtgcgcaaaatcatatcaagaaggaagatggccgggtgcggtggctcatgtctgtaatcccagcactttgggaggctgaggcgggcggatcacctgaggtcagaagttcaagaccagcctggccaacacggtgaaaccctgtctctactaaaaatacaaaaagtagccgggtgtggtggtgggttcctgtaattccagctacttgggaggctgaggcaggagaatcacttaaaccccagaggcagaggttgcagtgagctgagtctgtgccactgcactccagcctgggaaacagagactccgtctcaaaaaaaaaaaaaaaaaaaaaatcccataaaaattagctgagcatcatggtgcatgcctgtaatcccagctacttgggaggctgaggtaggagaatcgcttgaacctgagaggcagagattgcagtgagccaaggttgcgccactgcactctagcctgggcgacagagtgagactctgtctcaaaacaaagataaagtagggcagtggcaatatccaaggcattctaaatgaaaatcgatatatatatatatatatttaacatgagcattttattacctgttgtaaagcatgaatcaaagcatgtttggaagatgtcagcatcccctccagccatcctcagtccaataaaatgtgtgcttgttgtgccattagagccatcatcaattcccccagctgaccttcctagcttccacccagcccatactctgaaatccctgcagcctcctgaatataaactttcaatattggtggttgggggtccctctcttgagggagggagggttagagtccctcctgcttccctggcttaccactctgccatcgggggagtctctgctccttccttcactgctgagtcttgatgggatttctggacccttctgttagcaccttgttgcaaaatagagatccttgaacaagactggactggagaagtatgcagagggaaggctgaagctctgtaactccagttctttgggctcaggtatccagagaatagcaatatgcccattgcaagggaatgggaaaaagtagtcgtcggctggacatggtggctcacgcctgtaatcccagcacttagggagggcgaggcgggtggatcacctgctgtcaggagttcaagaccagcctggccaacatggtctttagtctctactgaaaataaaaaaattagctgggcgtggtggcgcctgcctgtaatcctagctactggagaggctgaggcaggagaatggcttgaacctgggaggaggaggttgcagtgagccgagatcgcaccactgcattccagtctgggcgacaagggcaaaactcggtctcaagggaaaaaaaaaaaaaaaaaagaaagtcgttaagggcaacagctaggtttatggactgagagagccgattgcagggttcaggtcttagctaagataactttccgcctccctgtctgtggtggctgcaggagcctccctccctaatgttctgtggctggccactggtcttatttaccgcatcacatttacctccatctgaaaagttcttggttatttgtgtgctatgtctgccccctctctgactgtacactccataagggcagggatcacctctgcttgttcacgcctgtactccagtttgcctggcacatagtaggtgctcagtaaatattccttgaatgaatgaatgcatgagtgaccaacgccctagtctgttttcagagctcttagtccaaacccaggttcaacttggggtgccaccaatccttgcgggggggggtgcctggccccacccttgtgaattgggaggatctgggtcaggccgtctccctcttgggggctccagtgccccagccgatccgcggtccttgtccaacagcccagaggccgctgtccagcgggccaggaggcggatcactgcgtcggcgttgaaatttccactcgcgctccaccgcccttcccgcgggccccgagcgcgcgcctgggcgcgcgcatgcgccttcgcccccgcgccgcgcgccgctcctgtgcgcctgcgccgcgctcacgaccgccggcgcgcctgcgcactgctcgccgcccgtgggcccagccggcgcttgcgcggtggcacgggcgagtgggggggcgaggaggtggaggaggaggaggaggaggaggaggtggcggcgagaagatggcgacttcgaacaatccgcggaaattcagcgagaagatcgcgctgcacaatcagaagcaggcggaggagacggcggccttcgaggaggtcatgaaggacctgagcctgacgcgggccgcgcgggtaagggggctgcccgcgccgacccttcagggccggcggagggagggagggggcgcgtgtccggcgcgtgcacggggcggggtgggggggggcgcggcgggggcggggcgcgcgcggcgggggcggggcttggcacggcccgagggggacaggtgtccccacgccccgggcgtcgtgggcgggacaggtgaccccacaaaatccatacctgatggggtacaggtgccctgcatcactgctccccggaggagacaggggcctctatatcattactactaggagggaacaggtgctagtacctcgtcgttacctgacaggggacaggtgtccctacatcattgttacccgagggggacaggtgccccacattattactacctggaagggacaggtgcccccgcatcattgctacctgggggggcaggatgacacaggtgtatgagctgggtgctgcttgcaagcaccattggtagctgggggtgagggtgcaagtgcccccgcatccttgctacctgggagggacagatgccctcccattcttgctacctgagggggaccggtgtctctacgtcatggttacctgtgcctttactccctgggtgttgggggaggaacggatgtccccacttgcagagctgaggtgggacagggatctctccctcttggacagctgagggaatggtcagatcctgtcccccagggggtccagaggggggccaagaaggcagattgtgctcagtcctggaacttggagtggagacagctgccccttctccatgtagcccatatggtgggggccaggtgatgttcctcccagtggaacaggggatgctgaccacagcccctgccctctcaggaccagggtggagggccaggtctgcctcaggtggctgggcgcatttggtgtgcaggggcaggccaggttctgccaggctcctgtctggcagagcagataccctgcaaatctcacctgggaagttgctgtgggccaggagcaggggcttggggctggtgtctgagcacggcaaggcacccgagttcctcaggcctcagtttcttgtcaggcattctagcaagaccttcctcttggggcagggtggtgagcacactctgcaaaggtgatgctgaatctccactttgttcttgcagtgtggtgagacctctctcctgcatcctggggccttggggagggtttgggtgggctttgcagatgctcgtatccctggtttccagattcagccactgatgtgactggctcaggtagacttaacctcagtctctgattccttaggtagcactttcagtctgtgttactttgtaactagttgtttgtttctctgagagattgtgaccttatagactaggatttgtgtcttcatttctgtgttggtaatgattgggagctcactgtcacccaggtactgctttaggcatgctcggtgagtgtgccacatctgtcctcccagctccaagcagctacattcttgctcaggatgtagagaaagagatggctggtgaatgaatgaatgaaaaaaaaataagaaaatggccaggtgtggtggctcatgcctgtaatcccagcactttggaaggctgaggcagtggatcacctgaggttaggagttcgagaccagcctggccaacgtggtgaaaccctgtctgtactaaaaatataaaaattagccggacgtggtggtagctacctgtaatcccagctactggggaggttgaggtgggagaatcacttgaacctgggaggtggaggttgcagtgagccgagatcatgttactgtactccagcctgggtgacaagagtgaaactccatttcaaaaaaagaaaataagaagaaagtgtgcaacttgagcatccttccacgtgagtgtcccccacatatcagggcttctgaggcaggagtggccacttctttttgtctccagcacatggtgtgtgctggcatgcagttgttgtcaaatgtttgcagtgtgaccggaagaaaggggtcacagtaggttcatgggtgtcattctgattagaagtccagtttctgcgtgggattggaaatagattattgttgttgaaaacatctctttaaaataatagctttattgagatatgattcacacatcatacaatttacttgtttaaagtgtacagtttggtggtttttagtatattcacagagttgtgcaaccacccctattttgtaattccagaacattttttatccacccagaaagaaaccccgtccccattaacagtcactccccattccccctcccctagcccctggcaagcactaagctgtcttctgtctctgtgggttttcctattctgggcattttatataaatggaatcacacaacacgtggccttttgtgactggcatctttcactcagcgtcatgttttcaaggttcatctctgtagtatcatggatcagtgcttcgttcctttttagggtcaagtaatattccgttgtatggatatattgtatttgtttatccattcatcagtcaatgaatttagaaaaattctgaggccaagtgcagtggctcacacttgtaatcccagcactttgggaggccaaggtgagtggatgacctgaggtcaggagttcgagaccagcctggccaacatggtgaaacccgtctccactaaaaatacaaaaattagtcgggtgtggtggcacatgcctgtaatcccagctactcgggaggcttagacagaagaatcgcttgaacctgggaagtggaggttgcagtgagctgagattgtgtcactgtactccagccttggcaacagagtgagactccatctcaaaacaaaaacaaaaacaagattctgaagatatgcaggtggcagttctttcagccctggaaaccatttcccatcttcctcatcacctggggtcaggggagcatgggctctgggcagaggtgagttcacactagatttttagacacaaagcattgttctctttctggggcagggggtgattctgccccccaggggacacttggtgatgtctggagacattttgggtcatcatgattagggagtgcttctagcatctggtgggtggaggctgggatgctgcccaaccccctacatgtagtgcacaggatggccccatcgtgtggaataatctggccccagatgtcggcagtgccaagactgagaaacttttttttttttttttttttttgagatagactcttgctctgttgcccaggctggagtgcagtggcgcaatctcggctcactgcaacctctgcctcccgagttcaagtgattctccttcctcagcctcccgagtagctgggattacaggcatctgctaccatgcctggctaatttttgtatttgtagcagagatggggtttgtagtagagaccatgttggccagactggtctcgaactcctgacctcaggtgatccggccacctcggcctcccaaattgctgggattacaggcatgagccactgtgcccagccaaggctgagaaacttttgattagaggtgtaacagtgaggtgggccagggtgtgagctttgcacctggtcaggtagagttccatcctttgctcccacctatatggctgtgccatctctggcaggctgcgaccagggtgggcaagcttattcccagtttgactggccactgcacagtccaagtggcatgtccgccgtgcctggagcaggtgaatgaacctatatgatgtgggcttccctcctgcagccatggcgcgctgcctcccatactgtagacagcaggggtttggccacacctgcagccaggtgaggcatgatcgggtcggcacctgctcctctcctttgaattccaaaggacagcatgtcactcatgcgtgtctgttcacagttgccggtggtgatggcacctgaggtgtcttgctgccgtggaaggccagtcagcagatgtttggctagaagacagggacctcaccagggcacaagcactgaagggttgggggacagggcgtaaagtcgggagactgtttgcaggtcttggggcggaggggtgggtgtgtgggcgttccctcccactcttaggcttgggtcagcgtgacaggcaggctgtctatggcgctctgctgtgtgacactgggtgggtttctcaacccctctgggccgtagaatcctgagttgtaaagttggggcagcgcgttcattccatcaaatgacaattttcattgtctggcatgtctcaagagcctggggtgctggggctcctgcagtgtacagggcatacggggctgtgttcttggggagccagcatagttttaggggggacaggagagcatcaatgcatccgaatgaagcagacgccctcagaaggtggcacacgctgggagagaagtggctcagccacgtgctaggagtggctgggacaggggtgacacagcatccccagagagcagggaagagcacttcagattggggacaggcacagtcagagccttgtggtgggaatgacttggcgagtttgagaatgggtggaaagcagggaggagggcaggtgaggctgcaagagcttggatctcccctgagggaggggtctgggaagcctccctgcttgttttgtttgtttgtttgtttgtttgtttttttgaggaggagccccccctgtcgcccaggctggagtgtggtggtgcgatcttgactcactgcaacctccgcctcctgggttcaagcgattcttctgcctcagcctcccaagtagctggaattgcaggcatgcaccaccacgcctgagtaattttgtatttttagtagagacggggtttcaccatgttggtcaggctggtcttgaactcccgacctcaggtgatccgcccacctcggcctctcggaatgctgggattacaggtgtgagccacggcgcctggccccgcttgtttttgtaacagctttattgagatgtcatttccatggcattccgccactcagtggcttttagtatattcacatttgcacagccaacaccagtcaacttgagaacatttcgtacccccagaaagagaccctgtccccatcaacagttacttcccactcccccttgcccagcccctggcagccacaaatctgctttggttgcttgctttctttttttttggagacagagtctcagctctgtcacccagtctggagtgcagtggcacaatctcagctcactacaacctctgcctcccggattccagtgattctcctgcctcagcctcctgagtggctgggattacaggcaggtgccaccacacccggctaatttttgtatttttgagtagagacagggttttgccatgttgggcaggctggtctcgaactcctgacctcaagtgattcacccgccttggcctcccaaagtgctgcgattgcaggtgtgagccaccacacctggtcaactaatgtggtttctgtctctatggatttgcctgttctggacatttcatatcaatagaatcctacacagtgaggcgaatcctgcaccatgaagccttttgtgtctgccttcttttacttagcatagtgacttcaagcctctaacttggatcagtgcttcatttctttctttcttttctttttctttcttttttttttttttgagacagagtcttgctctgtctctcaggctggagtgcagtgagccaagattacgccactgcactccagcctgggcgacagagtgagactccatctcaaaaaaaaaaattgatggccatatatatatatatatatatatgtaatataacacttaccattttgacgttttttaagtataaaattcagtggcattaagtttattcccagtgtggtgcaccgtcaccggcatggctcagtaatagttcatgtcatattccatggtgtgggtctaccccgttttgtccattcatctggccatgaacacgggttgtttccacctttggctgtcgtgaatcatgctgctgttggcatctttgtccacgtttttgggtggatgtatatcttcatttctcagagcatgtgctggggagtagagttgccgggtcctctggtaactctccatttatccatttgaggacgtcgtgtgtctcaggaggatagctgtggctgtgagtgggatgggtgtggtgtgagcatccgctgcaggtgtccagatcagggggaatgatagctggagcaagggggtgacagagcgggtggatttggtggcatttctgcagcagagccacccagacgtgctggaggattggatgttgggggtgaggggaagggaaggggggagtgtcgtctgcttgccaggggttcaggacattggggattcctcgtatgactgatcattgatgacctcagacagcaacacctgggccagaaaaagtacccaggcaagacagtcatggtggcacggtcagggctgaaggagggcactctcctgctgttacctactgtgaagctggagtaaaacgggcccctgggctgcaggcacagcgcagtggtggctcaggttagctgagtgtggagcccgccccccagtcctggctttggcgctatttgtttctgtgccggctgcttcagctgtctgctgccatccgcagcctccatatacaggcaggactccctgagctgctccctgaacaaaaggtggggcaagctgccctcatcctcatcactctccaggcccctccaaaaagctaagctgtctcagtactccccaggttgtgagctgcatgccctgcagcaggctgagtggtggcccctaaaaagcatctgctcaccttctagccctgtaacccgtgaattggaccttagttggaaaaaaggtttctgtagatgtgattaaggtaaggatctggagatgagatcatcctgggggggtggccctaaatccggtgactggtatccttatgaagagtgggccatggctgggcgcagtggctcactcctataatcccagcactttgggaggccggggtgggcagatcacgaggtcaggagatcgagaccatcctggctaacatggtgaagccccgtctctactaaaaatacaaaaaaattagctgggcgtggtggtgagcgcctgtagtcccagctactcgggaggctgaggcaggagaatggcgtgaacctgggaggcagagcttgcagtgagccgagatcacgccactacgctcgagcatggatgacagagcgagactccgtctcaaaaaaaaaaaaaaaaaaaaagaagagtgggctgggagtggcgatgcatgcctttaatcccagagttttcagaggccgaggcaggaggattgtttgagcccaggagtttgaggttacagtgaattataatcactccagcctgggtgacagagtgagatcctgtctcaaaaaaaaaaaaaagaaaaagaaaaaggaaaagatggagggggaccaggcacagtggctcacgcctgtaatcccaacattttgagaggctgagatgggacgataacttgaagccaggagtttgagaccagcctgggccacaaagagggaactcatctctacgaaaaaaaattgttttttaattagccgggtgtggtggcgtgcacctgtagtcccagccacttgggagggtgaagtgggaggatcacttgagcccaagagttaaggctgtggtgagccatgattgtaccattgcactccagctggggtaaaagagtgagacccttttctccaaaaaaaaaaaaaaaaaaaaaagacaagaaaggacacagagacacaggggagaggaccatgtgacaatggaggcagagattggagcgatgtggtcacaagtcaaggaatgcccagagcccccagaagctggaagggataggaagggtcttcccctagagcctctggaggaagcatgggcctgccggtgcctcttttttttgttttttttgagatggagtctcactctgtcgcccatgttggagtgcagtggcgtgatctcggctcactgcaacctccttctcccgtgttcaagcgatcctcctgcctcagcctcccgagtaactgggattacaggctcctgccaccacgcctgggtaatttttgtattttcagtagagatggggttcatcctattggccaggccgatctcgaactcctggcctcaaatgatccacctgcctcggcctcccaatgtgctgggattacaggtgtgagccaccgcgctcggtcttccccacccccactcttaggacacaatccatacccgaacactgagctcctacactccaaccccgaccctgtggtcctgatcctccaccccaggccctgctcttgctgtctccctctgtctcatccagtgtagagcaagggcccctgctactaaaaagggctgaatgaagggtccactccgggcctcggtggtaaccccacacaaaacctgcggagccagctggagctggctggacttatgcatctgcaagcggctgcagccctgtcctgatgtgaagtccacaaggttacctggtgctacaggttctgtcaggcccggggttccttgccactggctaaagtcacaaattaccacaaagtgaggggcatgaaaaacagaaattaattccctcaccgtcatcaatatgatgaaaccccgtctctactaaaaatacaaaaattagctgggcatggtggcatgcacctgtaatcccagctactcaggaggctgagacaggagaattgcttgaacttgggaggtggaggttgctgtgagcagagatcatgccattgcactccagcctgggcaacaagagtgaaactctgtctcaaaaaaaaaaaaaaaagaagtggttagggtgtgcagcgaccaggtccacgtgctctggggaatctgggagggcttcctggaccctcagcgtgtgtgaaaccaggggctgcagggctgggtgaggagcagatgtccctggctcaggaacaggcatggcacttgtggctctgcagttagaaattcatttttctgggccgggcacggtggctcacgcctgtaatcccagcactttgggaggccgaggcaggcggatcacaaggtcaggagatagagactatcctggctaacatggtgaaaccctgtctctactaaaaatacaaaaaattagctgggcatggtggcacgtgcctgtagtcccagctactcgggaggctgagacaggagaatcgcttgaacctgggaggtggaggttgcagtgagccaagatagtgccactgtactccagcctgggcgacagagcgagactccgtctcaaaaaaaaaaaaaaaaaaaagaaattcatttttcggccgggtatggtagctcacacctgtaatcctagtattttgggaggccgaggtgggcagatcacgaggtcaagagatcgagaccaccctgggcaacatagtgaaactctgtctttactaaaaatacaaaaattagccaggtgtggtggtgtgcacctgtagtcccagctacttgggagggtgaggcaagagaattgcttgaaccagggtgctggaggttgcagtgagccgagattgtgccactgcactccagcctgggtgacagagtgagacaccgtctaaaaaaaaaaaaattcatttttcatggcttgccagcacctaccaccaaatgtgcaatcaagacaggttttaccaaggagcttaactcttttgtttttgttttttttttttttgaaacagagtttctctctgtcgcccaggctagagtgcagcggtgtgatctcagctcactgcaagctccgcctcctgggttcacgcccttctcctgcctcagcctcctgagtagctggggctacaggcgtccaccaccatgcccggctacttttttttgtatttttagtagagacagggtttccccatgttcgccaggatggtcttgatctgatctcgtgatccacccgccttggcctcccaaagtgctgggattacaggcgtgagccaccattcccggcccgcttaactcttactgtttgcaggcacactgatgtactctgttttgttctaatatgaaaattagcctgggctgggtgggcacagtggctcacacctgtcatcccagagctttgggaggccaaggcaggtggaccacctgaggtcaggagttcgagccagcctggccaacatggtgaaaccctgtctctactaaaatacaaaaattagctgggcatggtggcgggcacctgtaaccccagctattctggtggctgaggaaggagaatcgcttgaacctgaaaggtggaggttgcagtgagctgagattgcaccactgcactccccagcctgggtaacagagcgagactccgtctcagaaaaaaaaaaaaaaaaataggctggcatggtggctcatgcctgtggtcccagctacttgggaggctgaggcgagaggttcccttgagcctaggagcttgaggctgcagtgaactatgatcacgccacttcactccagcctggccgacagagagactccatctcaaaaaaaaaaaaaaaaaaagaagaagagacgaagaaaaaaataaaaagtaccagttgggacccactgaattgataacttactaatccagagctctgtaagctacgtctctttattttattagaacatgggcacaaccatttattccttttttgtggctgcttttgtgggacatcagcatagtcccatgcaacagagatcatgcggtccactgtggctttgacctcctgggctctagcgatcctcccacctcagccccctgagtagctgggaccacaggtgttagccaccatgcccggctaatttttttattttttgtagagacagggtcttctccctgtgttgtccaggctggtctcaaactcctgtgctcaagcaattgtcccatcttggcctcccagagtgttgggattacaggtgtgagtcactgcgccaggcgcatctggcccttcacagaagggattggctggcctctgggactcacacacagtttgaaacccactgacctcaagtgttaaggaagatcagctgcaggggctgggggtggttagcaaggagagtgaggttggcggcagttctcccactttcagcgacctctttttttttttttttgagagagggagtcttgctcctataagatcttggctcactgcaacctctgcctcctgggttcaagtgattctcctgcctcagcctctcaagtagcggagactataggcacgcgccaccatgcccagccaatttttgtatttttagtagagatgaggtttcaccatgttggccaggctgctctccaactcctgacatcaagtgatctgcccgcctcggcctcctaaagtgctgggatcacaggcatgagccaatgtgcccagctaatttttgtacttttggtggagttgggggtttcgccatgtttgccaggccggtctcgaactcctggtctcgagacctgcccgccttcgcctctcaaagtgctgggattacagatgtgagccactgcgcccggcctggggatttctttttttaaatgggactctgtaaaatgccatatggacagcacaagtggggtctgccctgggtagagactggcctgaacccagggtcagggaaacatcaaaatccacaggttattccgtgcagagtagggggctcacttggggccgattctgcccctgggggcatttggcaacttttggggacatttgtggttgtcacgacggggaatggggtgctactggcatccagtgggcagagactgaggatactggtcaacactacagtacacacggccgggtgtggtggctcacgcttgtaatcccagcactctgggaggctgagacaggcagatcacgaggtcaggagatcgagaccatcctggctaacacagtgaaaccccgtctctactaaaaatacggaaaattggctgggcgtggtggtgggcgcctgtggtcccagctactcgggagggtgaggcaggagaatggcgtgaacccgggaggcagagcttgcggtgagccgagatcgcgtcactgcgctccagcctgggcgacagagtgagacttcatctcaaaaacaaacaaacaaacaaacaaaaacactacagtacacaggatggcccccaccacagggaattatccagccctaagtgtcagcagtgtcacagtccagaagccctggtgtcaggccctgtgtgtgccgggagcatgcaggtgcagaggggtgggtggaggctactggctacatgagatgcaaacctggatcctgtagtacatgactgctctgggcagctggtggcgtcctcccgggtttacagagtgggagacaggcccggagagcgaatgtcatagagcgctagagtggagaggctgccatctgacccaggttggactaaccccgcagcctgtgtgtttttgccgtgtcacggagttctgggagttggccggctggtcagggtgaggcagggcggttcaggctgctggaagcctgtgtgccgaggaaggggccctcagagcaggtacgacagtgggtggagggcctggagccaggccctgccatgtggagccatggaaggttctagtgggatggcaatgtgagtgacagtgggggtccagggagtggcaggaactggccttgctagaatccatgtatttgtgcacagtggattgttgcagtaactcatgagaaagggcctgttgcctgcccccatggcacagatgagaaattgaggcacaggaggtcacatggctgacggtgggaggaggagctgggacttgaacctgtgtctgactccaaggcccatgcggaggaccttgttgtacgctgagcctcagttcatgttcatctgttgagaagcatagaggttgtccctggtttttctcaacctaaacattctttgtgtttgtcccagtgcatgtactgggggagtggggacctctccaaggtgcctgcctgggaatggccccacctgtgtgtccctgagccccctccagtagggaggagggcgagcagctggaggtgtgccactcacggaggaagactcggggcatttaggaggtgatggtgacagggattattgggagggcgggtgggggagtcccaggctgcagcgtgggaaccagaatcacaggggaggggtggggggtaggagagtcctgcttcaccttggagctcatgggatagaacacacccccactttatttctggttggggtatgtctctgacctccaacaggtcctgcgtggcccctgggtggaggtgggtgccctgttcttctgggtgtggctgtggtgccagcagctggatgggggtccaggtgtgtaaataaggaagtgccgcgtgcctcgagggccagggatgcccgagagccaatgtttattatttgccaactggaaacgaagcatggccggggcctcctccttggggttcttgcacggagggattcagaagcacttggcaccggggggagcagcctcatcggtgtccagccagggccacacagtcagcctcagcccccacctcgcttccttctgggcgagcttagacctgggaggcctctttttttttggagtgccgtggtgcgatctcagctcagcaacctctgcctctcgtgttcaagcgattgtcctgcctcagcctcctgaatagctgggattacaagcgtgcaccgccatacctggctaatttttgcatttttggtagagatggggtttcaccatgttggccaggctggtctccaacttctgacctcaagtaattctccctccttggcctcccaaaatgctgggattacaggcatgagccaatgctcttggcccaacctgggaggccctgctgtctttggtgcatggtgcagtaggggtcacagtggtctctgcctcattggatcatggtgagacgtgaatgtgaaggcatctggtgtatctggaatggggcctggcatagatactcactgtgtgctcactgctgccaagatgctggaggtgtggctactgtggacacatggtgtacccagttggcactgggcaggcatttggcaggcatccaacaggtgcttgatggggacacagcaggcctgcaagaggcacttcgtgcccacacaaggaaatatttagcagatgttcagtaggtgcccagtagatgctcagcaggcacacagtgtgtactcagctggtgttcaacaggctaatggtatgtactcagctggtgctcagcaggcttacagtgtgtgttctgcaggtgctcagcaggtgcacggtgtgttctgcagtgtgtactcagcaggtgctcggcaggcacacggtaggtgctctgcaggtgcacagtttgtgttctgcaggcgctcagctggcgcagcatgtactcagcaggcgctcagcaggcactcagcaggcacacagtgtatactcagcaagtgcttagtaggtgcacagtgtgtactcagcaggcactcagcaggcacagtgtgtactcagcaagtgcttagtaggtgcacagtgtgtactcagcaggcgctcagcaggcacagtgtgtactcagcaagtgcttagcaggtgcacagtgtgtactcagcaggtgcttagcaggcacacagtttgtactcagcaggcgctcagcaggcacacacaacagtgtgtactcagcaagtgcttagcaggtgcacagtgtgtactcagcaggcactcagcaggcacagtgtgtactcagcaggcgctcagcaggcgctcagcaggcacagtgtgtactcagcaggcactcagcaggtgcacagtgtgtactcagcaggcgcacagtgtatactcaccgggcgctcagcaggcgcagtgtgtgctcagcaggtgctcagcagatgcgcagtgtgtactcatcaggttctcagcacatgcacagtgtgtactaagcaggtgctcagcaagtgcagtgtgtacttagcaggcacttagcaggcgcacagtgtgtattccacaggtgcacaatgtgtatacaggtgctcagcaggcgtacagtgttcagcaggcacacggtgtgtattcagcaggtgcacagtgtgtatttggttgctgagcaagtgcacactgtgtactcagtaggcgcagtgtgtgctctgcgggcactcagcaggtgcacagtgtgtatttagcaggcgctcagcaggtgcataatgtgtatttagcaggtactcagcaggcgtaccgtgtgtgctctgcaggcgcttagcaggtgcacagtgtgtatttagcaggcactcagctgacacacagtgtgtatttagcaggcgctcagcaggcacagtgtgaactcagcaggtgctcagcaggcatcagcaggctctggaatctgacctccctgtgggcaggcctgtctccagttcattctggaatctcatagaagcaggtgctctctaagagggccagtaccatgtcacatggtccaatgtccccacttcagtcctgggaggggtgtgcggggtcttctcaatacctccatctgggaacatgtaccggctgttgaggggccctgaagtgagaagagtagtttgtggtcttcctggagctcacatttttctaagcaaatcctgagcctgtatacttgtacggaacacagtgtgttccagggtcaaatcctcggggtaggatggccctggggctgcatgatggtgcccacccagccctctgagtgcctgaacaagaagcactggggtggcccggtgagttctccctgcagcagtgagggtttggataggaaagtccattcctcgagtcagttggtatttcctgagcatctcctgtgagctggccccggagacaccttggagagcaggtcagctggagaccctgccctagggagtgacaggaagccacacctgtgccagctggccctgcccctgaggttgcggctctgagccaaagcgaagagcctggcctcgcctggctctgggggtgatgcctcgtgggccagggtgaggggttgagatctggtcctgggatggggagggttttgagcagggcagtgatgtgggatttatgctttgcaaggatcccattggctgccatgtggggacaggcctgggaggaacgagtagggagcagcaggaggcctaggaggggccagggcaggtgtcccccggagatagtgggtgctggggctctgtgatgacctggggcttggcaaaggcgggcttgtgacagactgagcctcatctcggcagctctcacacccatggatcctgagcctgattccccaggagggttggcgacgggagggttatgttaagtggctgcgtcttccatctcagggagccccacactggggaacgtcaccactatagcggctgagaggctttgggtcctcatttactacataaaattcccccttctctgtacttgggtcctgacgcctccgctggtcccaggagtttcactccgtggggtggggttgaagggtgcggtgaggcccagaggggctgagtctgcttggaagggtgggccttctcccactgcgggtgctaataccctgtgcccatatcctagccaccctgtcccttatccacataccccactctggtatttcaacagcccagagaccaccacggtgcttgggggctctcggcaagggggcgaagcctccctgagaacttctgcaggccgcccttctcttccctttcctgccggggctcttgctgcagagaagctctctgccacacttttttttttttaaataaaaaaaatgaaaataaagaaatcatttatgtttcaaaactttgattaaaattgaaaacagaaacaccacagcacttcccgtttcctctgcatctggcaccactcacctgggtgcagagggtgggtgggtgcatgccagctggtcattcgcccggaaatctctgggaggaagtatcagcacagcctagcagggcgcctgggactggctctgtgggctggccgtccctctggctggggacacggggaggccgagcgtgtccgcaaagacacgcgagctgtccacctttctgggctgcaggggtctgcagaacctcggaacctcggaggggctctctgtctgcttcagcgtctctttctcaagtgactgaaagcagaggctccctgctgcgttacaccattgagtcctttcgcatctgtgcgcatcccgcttccatcgctgcggggatcccttcggtcctcccaggcaggcgagattggtggctgtaattaggacaggagtggctcattatatcatcacagaataaatgcacagaccctggggatgatttatggtcccaacagcctatctttgcgcccaggcggcctcggcctctgttcggcaaggagcccgctaatcccttcactgccggctcagccggggcagaaggaggagcctgaaggtccaccatggggtggaggctgcctgctcgcgggcccgcccccagagcccggggctcatcacgctgctctatgcgcctctgttggctcctgccaaacagtccctcccttctgtgcctcagtttcctggctgtaaaaagggggtgctcacagagcccccttgaggagtcgtcacatggattagatgatgcatccacgcaaagtgtctggccccgtgcccggcccgtggtgggtgcacaccttgaaagatgcctgcttggccgaggccagctgttgagctgctacttggggcaacagtgagagcaggatcgcaccttgttcacctctgtgccttggcccagaatatgacagctgccactgtgtggcttatgggtcatctgtttagtttcacctgagggagtattcattgctgttaactgtttcttatgagataggatttttgttttttgttttttgagacagaatctcactctgtcacccaggctggagtgcaatggcgccatctcagctcactgcaacgtccacctcctgggttcaagcgattctcctacctcagcctcctgagtagctgggattacaggcgtgtgtcaccaggcccagctaatgttttttattttttttgtatttttagtagagacggggtttcaccatgttggtcgggcaggtctccaactcctgatctcaaatgatccgcccaccttggcctcccaaagtgctgggattataggcatgagccaccgcgcccaccgttttgttttttttttttttttttgagacggagtttcactcttgttgcccaggctggaatacagtggtgcaatctcggctcaccgcaacctcctcctcccgggttcaagcaattctcctgtctcagcctcccgagtagctgggattataggcgtgtaccaccacacccggctaattttgtattgttaatagagatggggtttctccatgttggtcaggctggtcttgaactcccgacctcaggtgatttgcccgcctcagcctcccaaagtgctggcattacaggcgtgagccactgtgcccagcatttttttttttttttgagacaaggtctggctctgttgcccaggctggactgcagtggtgtgatcttggctcactgtagcctcaatttcctgggctcaggcagtcctcctgcctcagccgcctgagtagctgagaccataggtgtgtaccaccacagctggctaatttttagtatatattttttgtagagacaggagtctccctgtgttgcctacgctggtctcaaactcctgggctcaagtgatcctcctcctgcctgggcctcccaaagtgctggcttgagccccatacctggcttcttaggggatagtctttttttttttttttttgagatggattttcgctcttgttgctcaggctggagtgcaatggcacaatcttgcctcaccgcaacctccacctcccgggttcaagcgattctcctgccctcagcctcccgagtagctgggatttcaggtatgcgccaccacacccggctaattttgtatttttagtagaggcagggtttctccatgttggtcaggctggtctcgaattcccaacctcaggtgatccacctgcctcggccccccaaagtgctgggattacacaggagatagtctcttagactttgtgaaaagttttggagatagtgcagggaatacccataaccccccacctgtttcccacattgtgaacatcacacgtgacctggttgcgacggccgggctgggacctccagttgtcacagttcttttttttttgagatggagtctcgctctcgctctgttgcctcaatttcctgggctcaggcagtcctcctgcctcagcctcctgaatagctgagactcggctcactgtaagctccacctcctgggttcacgccattctcctgcctcagcctcccgagtagctgggactacaggcgcctgccaccacgcccggctaatttttttgtgtgtatttttagtagagatggggtttcaccttgttagccaggacggtctcggtcaggatagagacggggtttcactgtgttagccaggatggtctcaatctcctgacctcgtgatctgcccaccttggcctcccaaagtgctgggattacaggcgtgagccaccgctcctggcccagttgtcacaattctattaactagactccagactgtgtttggatttccccggattgctcctttaagcaccttctctggacagggttgtgtgttgcatttatttacttacgtatttatttatgcatttatttatttatttatttatgatagagtcttgttctgtcgcctaggctggagtgcagtggcacgatctcagctcactgcaagcaacctccacctcccaggttcaagcgattctggtgtcttagcctcccaagtagctgagattataggcatgcaccaccatgcccggctaatttttgcgtttttagtagagatggtgtttcgctgtgttgaccaggctggtcttgaactgctgacctcagatgattcgcttgccttggcctcccaaagtgctaggattataggtttgagccaccgtgcctggctaatttttgcatttttagtagagatggggtttcactatgttggccaggctggtctcgaactcctgaccccaagttatctgcctgccttggcctcccaaaatgctgggattgcaggcgagagccactgcgcctggcaacgtgttgcatttagtcaaagcatctcctttgattcctccaatctgtgatggttcctcaatgtctcctcatcatccgtgaccttcactctcttgaggagagctggtcaggtgttttgtggaatgtccttattgtggtcttgtggaggttttctggcaattggactgaggttgtgggattttggtggggatcccacagaagtgaagtgctcgttttctttttatattttttctttttttatatttaaaatagggatctgcctgtgttgcccaggttggagtgcagtgctcactgcagccaggaattcctgggctcaagcaatctttccacctcagcctttcaagtagctgggactacaccatcatgcctggctttgttttaaaattcttttgtagagacgggggtcttgccatgttgcccaggctcaagtgatccaccctccttggtctcccaaagtgctaggattacaggcgtgagtcaccatgcccagcctttttcttttttttaaagttagtaaaatacacataacatgtggccagatgcggtagctcttgtctgtaagcccagcactttgggagactgaagcaggtggatcacctgaggtgaggagttcgagaccagtctagtcaacatgttgaaaccccgtctctattaaaaatacaaaaattagctgggtgtggtggcaggcgcctgtaatcccagctactcgggatgctgaggcaggagaatcgcttgaaccctggaggcagaggttgcagtgagccatgatcgcaccactgcactgcagcctgggcaacagaacaagaccctgtctcaaaaacaaaccaaaaacaaaacaaatacacataacgtgtaagttactgtcttaaccttaagtgtgcagttcagtggcatttagtaagtatcctcacattgttttgcaatcatcaccaccatctgtgttcagagcttttgcatcttcccgcacagaaactctgtccccattaaacactcacccacccaccccctaccccccaatccccaacccccaccctcctactaccctccattccctcccagcccctggcaaccaccatcctattttccacctctatgagtttgacgactccagggacctcatgtaaggagaatcatccaggatttatcattttgtgtctggcttatttcactgagcataatgtcctcaaggttcgtccacgttgtaacgtgtcagaacgtccttcccctctaaggctgttattccactgtatggatgggacacattttgtttatccgttcatctgttgatggacatttggctggtttcaccatttggctattgtgcgtagtgctgctgtgaacattggtgtacatctctttgagtccctactcataatttttttgggtatattcccagacatgggattgctggatcatgtgtaattgtatgtttaattttttttgagacagagttttgctctaccacccatgctggagtgcagtggcgtgatctcggctcaccacatcctctgcctcctgggttcaagcggttctgcctcagcctcccgagtagctggaattacaggcgcatgccaccacacctggctaatctttgtgtttttaatggagatgggggtttcaccatgttcgccaggctggtctcgaactcctgacctcagatgatccacctgccttggcctcccaaagtgctgggattacaggcgtgaaccaccacgcccagccagcatgtttaattttttgaggaactgccacactgttctctgtagtggctataccattttatgttcctaccaacagtgtataaggatttcagtttctccatatcctcaataacacttgttattttctgattttttgataatagccatcctaatgtctactaatatttactaatcctaatattttttttttgcaaaaaatgatattttgatagggattgtggttttggtttgcatttccctaatgattagtgatgttgagcatcttttcatgtgcttcttggccatttgtctgtctttggagaaatgtttattcaagtcctgtgcccttttccttttcctctctctctctctttttttttttttttaatgctttttagtatattcatactttatctattttaaattgggttgtttttctttttgcacttggagatcctgttttcccagagctatttgttgaaaagaccatccttttcccattgagtagtttggcacccttgttgaaaatcacttgaccatatatgtgacagtttatttctgggctttctattctattccattggtctttttttttttttttttttttttttttttttttttttttttagacagagtcttgctctgtctctcaggctggagtgcagtggtgcaatcttggctcactgcaacctcctcctcccgggttcaaagcgattctcctgccttagcctcttgagtagctgggattacaggtgcccatcaccacactcagctaatttttgtatttttagtagagatggggtttcaccatgttggccaggctagtcttgaactcttgacctcagatgatcccccccgccttggcctcccgaagtgttgggattataggcgtgagccaccacatctggccccattggtctttatgtttctctttatgccagtatcacactcttttgattactgtagctttgtagttaagttttgagatcaagaagtgtgagtcttccaattttgttattctttttcaatattgtcttggctatttgaggttttttgagattctgtatggattttagggtggatttttttctatttctgcgaaaaaggatattttgatagggattgtggttttggtttgcatttccctaatgattagtgctgttgagcatcttttcatgtgcttattggccatttgtctttggagaaatgtttattcaagtcctttgcccttgttttttagcgctttttagtacattcacattttgactatttttaaattgggttgtttttctttttgttggtgggttgtaagagttctttatatagtctacatattgatcccttatcatctatatgattcgcaaatattttctctcattccgtgggaatggggccttttcactctgttgattacgtcttttgatgcacaagtgtttttaattttggcagcatccaatttatgtattttttcttttgttgcctgtgcttttggtgtccgatccaagaaattattgccaactccagtgtatgaagcttttcctctgttttcttccaagagttttatagttttagtatatatagttttagcttttatggttttagttatagagttacagttttagttttttacttttatagttttagctttagatctttgatccgtcttgagttaatttttgtatatggtgttagatcagggcacagcttcattcttttgcatatggagatcttgtttttccagagccgttttgttgaaaagactgtcccttccccgttgaatggtttggcacccttgttgaaaatcacttgaccatatatgtgagggtttatttctgggcttttattctattccattggtcttgatgtttgtctttatgtcagtaccacactgttttgattactgtagctttgtagttaagttttgaaataacaaagtgtgagtcctccaattttgttatttttcaagattgtcttgtctatttcagattccttgagatcccatatggattttagggtggatttttttctatttcttcaggaaatggtattttggtagggattgcattgaatctagactgttttgggtagtattgccacctctgaaatattaagttgtggccgggcacagtggttcacgcctgtaatcccaccactttgggaggccaaggcaggaggatcacttgagcccaggagttcaagaccaggcagagcaacgtagtcagatcctgtctctatttaaaacaacaacaacaaaaagaagtcacactctcctcctcccagctatgtgaccctgggcaagcccataattggcccctgcctcagtttccccatctgtaagatgtgccatgaagggggctaactctgtcaatgcatgaacagtcctcaggactgtagcttgcacaggtagtgctccatgaaggcagccatgtctcctgggagggctgcctggaggaggagagctctgcagtgggacattaggggtgaggtccgagttgccggtgcaagaggtgggtagggaagggaaggctctttgggtggaggagaaacagcatatatggggcccagaggcctacaggaggcagggaaggaggaaggagagaggagacccagatctggaaaggcccaagagccaagctggagagcttggacgtgatcccacagccagctatggggtggggaggggtgacccaggatcagctttgagctttaagaaaggctagagaaaaggtggtggggttggagaggagaacagggaagggagttgtgggttctggaggggctcaggaactgcagaggagaggtgaacccagggtgcccgagagaggaacggggccaccccgggtttctggcttctgtatcagcatcaggaagatcatggcactgtctgccagggccaggtgaattgggcacgttggctgggggaatcgggaccatgacgagcctggtgaggggctgctgggctggaggagtctcctggggcatcacagggaatgttctggaagcagggctggggcggcacttgggagttagctgacagtaaggagtgacgtgagaaacacagaggccaagtcctcggggagccaagtttgagaggcagacggagcgtggggaccgaggtcagggctcctgtggggccggcctggcccttcccttcccaccgccgttcgggaccctgtggtatcttccgtgggcactggccctgctcccagctgagcggtgcccagaagcaggaggaccctggtttcctgcccctactcagccaccctgcccacgccgtggcaagcccagagctgtgctcagttcaggcagccgtgtggccaccctggtgactcctccctgccgctccctgctgtcctgtcctccgtggggtgctgtctctaggcccgggaggaaggctgaggggaaggcctcatgggtgcagtgggtaaatgtccacccggtacctcctctgagcccgcatggtgctcggaggtgcagggtcccagggctgtttctggagcagcaggtgccaggcatggcatgggaggggccttgtggagcccagagtcgcaggtgcacctggcagtgggcagagcagctgcagaggcttggtgttggcagggtgcacatgaggaggtggtagccaaggggacagggcctcccagcctggtgcccgcagcctccctcacacagggaccacctttcccctcacctggcccctcatcctctgtcctgatgtcccctcatggtgcctttttatgcccaccttgcccccacacgtaaccctcaggcagtgggagaagggctgcagcaggggggtgtggctcctggtgcaggggacaggccaggtggcaggagccaggacagcttcagagggagaagcctccaggcccaaaatggggcctagacaggaaggagggagcgggcaggttaagaagggcagtatctgcatggggctgagagggagcagagagggcatctgagggtggctgggggctgtgtctgagcaaggccatggatgggagttgggatgagcctctgtacctgcggacacccctgctgaggtcctctgggaagccggcagtgcacctaggactccacctgggggagatgggtcccgtctgccctgggcgggcttcctcatgctgggaccccagcctggaacgcagccaggatcaggagccctaaagttaggacctgagggctccgagggctgaggccggggacagctgcctggcgttccctgccgtggatgggctgctgctcccatgttgcctgccctgccctggcccatcagtcctgcctcctccagcagcggtgactttgccacagggaggacagctcaggtcactcctggttaaatccttccagcggcttctcgtcccacccaggatggggtcccacaaagctcagctctcttgaggctctgagcccagcacccgcccccccacacttctttgcccaccctggcttccttggcgagccactgtcatggtcactctgtgaccccagggcctttgtgctcacggggcctcctgcctggagtgctcttcccagctccagcgtcacctccttggccaccttccccccaccccatttccagcttgttttctgcacagccccactcactcggaagtctcccacttccttcctccatctacccacccagctgcccggcccatgcccatctgagccagcacagcttgtcctgggccagcaaggacttgtggcttcccctgctgtggactccccgttcctcgacgtccctccctggcctcccgtcctactgcctgggggcagtgtctggccagcagatccttcttgaaagggaccatccctctgggtgagctggacatgcagggttttctggggctgctggagggggtgggagccaggagccagtgtgagtcggcggccggccgggctcctggctgtgttgagctgttccctcccatgggggctttgggtcagagggtagcgagggtcacactctcaggcacccttgactgtttattttttacatttattttttatttattatttatttattttttgagacagagtctcactctttcacccaagctggagtgcaatggcttgatctcggctcactgcaacctccgcctcctgggttcaagtgattctcctgcctcagcctccccagtagctgggattacaggcacccgccactgtgcccggctaatttttgtattttagtagagatggggtttgggttttgccatgttgcccaggctggtctcgaactcctgacctcaagcgatccacagccttggcctcccaaagtgctgggattacaggtgtgaaccaccgcgcccggcctcacccttgactgtttaggaagcccatgcccaggcttggccagtcacccctctttcttcaccctgtcccaccccacagtgccccctccccagggctttgtaggcctccagctgatggggagtctgctgtggccagggctgctaacagttaactgctggatgagctgcagtaaatttccttggggttttggctcagggtgagacccgcattcccagctttgcttggccacatgcggcatcctagcactgaaccttcccgtcccaggtggcctgcttctcggggaggggcctgggaggacttcttgtttgggagtcggggagccatccttccctccaggccttgggtcagctcagcccacacagctgctgacccagagtgaggggcagtgggacgcgttggccttggcggccccggggccgctttgaaggggagcatgagggcaccgatcctgcgcctctgtgcctgggccgggcgggagctggggatgcatccatcgcctgccaggaatccgggccctgagttgtcggcacttccagcgtttcaggagaagccaagcaattctgatgtttaagttaacttaaaagaaaaaaaaagtaaaagttggccaccagtttgcatttttaaaaaaatgcttctcagacctcaggaaggccacagctgcggccggccacgctcctgctcctgcctgccaggttacaggctctgacgtgggcctgagggcctctgggctgtagtgggtggggcggccgtgctggtcctggggtgggtgccgggcagttccgcccattcccggctgcgttgggagggggtgtgtgatagccaagaagcttgatgccaagggtcttggatcagcagctgacgtcctcttccttatacacatgtgggaccgtggtggcttcctggttagatggcactagggtggtctactttgggcccctccacccacccccacactgccagaaccttgggtatactttttatttctcctttatacttttttcactgagataaaacacatataacataaaaattagcctttatttaattttttgagacagggtcttgctctgttgcccaggctggagtgcagtagttctatcccagcagcctcaacatccaggctcaagtgatcctatcacctcagcctcccaagtagctgggattacaggcgtgtgccaccatggccagctaatttttaaaatttttttgtggagatgggtctcactatattgcccaggctggtctgaaactccttcctgggctcaagccgtcctcctgcctcagcctcccaaagtgctggaattagaagcatgagccactgtgcctggcccagttagacgtttgtttgtttgtttgtttttgagacaggagctcactccgttgcccaggctggagttcagtggcatgatgttggttcactgtagcctccacctcccgggtttaagtgattctcccacctcagccttcctggtagtgagattacaggcgcccaccaccacacccagctaatttttttgtatttttagtagagatagggtttcaccatgttggccaggctggtctagaactcctgacctcaggtaatccgcctgccgtggcctcccaaagtgctgggattataggcatgagccaccatacccagccctaattagccatgttaaagtgtgcaatttagtggcatttagtaccttctcaatattgtacagtgaacacctctgcctggctccagaacatttcatcctcccaaaaagagaatccccttagccgggtgcagttgcccattcctataatcccaacgctttgggaggccaaggcgggcagatcgctcgaggtcaggagtttgagaccagcctggccaacatggcaaaactctgtctctactaaaaatacaaaaattagctgggcatggtggcatacggctgtaatcccagctacctgggaggctgaggcaggagaatggcttgaacccgggaggtagaggctacagtgagccgagatcgtgccactgcactccaggctgggtgacggagcaagactgtctcaaaaaaaaaaaaaaagaccccaccccctatccccatcagcagttactccccgttcccctccccagcccctggcagccagcagtctgcttcctgtctctatggatttgcctgttctggacatttcagatcaatggaatctcacactatgtggcgttttgtgtctggcctctctcactcagcatcgtgtcttcaggcttcttccacgtcgtagcatggatgagtgcctcattcctttccatggctgaatagcattctgctgtatggatggagcacatctggctgaagcacattctgctgtatggatggagcacattctgttcagccacttgtctgttgatgggcatttggcctgtttccaccttttggctgttatgaacagagctgcatggacatgtgtgttgcagggtttgtgtggacactgtcttcagttctcttggatctatactgaggactggaattgcgggatcctgcagtgactctgggtttaactgtttgagtagtggccgggctgtcttcccggagtagaccagttttctaagctccttttccttgttctctgctgtgccccttctgtgggagctgaggccctgcacccttaggcgtcctcctcgtgcccctcctccctccaatgttactgggcctgttgttggggtctgtagtgtttctgtatggctctgcagaggccaggctcaccgccggttggccttagctcaaggtccaggttcgtgttggctgggattcctgcccaggtccatttggaatattccacttgcgcgtgaagcaaaggcccaagtatatgaagtggcgtgcccaggcacagagcccctttctgtacacccagctgcacgcgcggggaggagctgacatcccaaaaggccacgcagaggtgggagctggaggacacagccctgcagtatctgctggggtgagccctgcaccactggcagcccgctccccagcctggtgggtagggctgttttgggagggcctgcaagtgtggaaacctacactaaaaatagcagccacatgcctcctgtgggcggcccacgctcacctctcctggcaccctagcgtgcccggaagcagcagggtgggagggcacaccaggccccacacaagcccatactgtccttacacgtatgcatgaggctgggtgagccatgcacacccaaggccaccctccacagccctgtatcccatgctagggtttggggtgccccagaaatcaggaatcagaatagctccatttgcaggaagacatcacagcacacatgcagccatgatgcagcttccccagtgggtccaggcgggcgcactccatccacctgctattcggtttgcaacaaaactaacactctttttttttttgagacggagtcttgctctgtcacctaggctggagtacggtggtgtgatcttggctcactgcaacctccgcctcctgggttcaagcaattctcctgcctcagcctcctgagtagctgggattacaggtgtgcaccaccacgcccagctaatttttgtatttttagtagagagcgggtttcaccatgttggccaggctggtctcgaactcctgacctcgtgatccgcctgctttggcctcccaaagtgctgggattacaggtgtgagccaccacactcggcctaaaactaatgctcattaaacagacaagggcagcttcccgtccactggtcagatgtggctactggccagcttgtgctgtgatccccagaaaggtctctccagagcattctcatttcagcatggcaggttagggattgaggtgtcgttctcacccccaaatgttgatgacccccggggaacctccaaccctgtggccacatcctgctgtctgcaccctgaatatttgggcctatatgctcccttgccctccctcagccctttggagggcctctcctgcccccactgggctctggggcctgcagttcccagcctgggcttcgggaaggatttccgtgcctgttcagggacctttcaagcacagtttttattattgtcctggggctgccactacaaatgaccacaaaatctggtggtttaagaaacagaaatgtatactctcccagctctggaggccagaagtccaagatcaaggtgtgggcaaggttgactatctgtagaagcctctaggggcggatccctcctgcctctgggggctcccggagctccttggcttgtagccgcatcactccagtctctgcctgtcttcacatggcctgtgtgtctgcatctctttccccttctcctctcttttttttcatttgagacagagactcgctttgccacccaggctggagtgcagtggtgcgatctcggctcactgcaacctccacctcccaggttcaagcaattctcctgccttagtctcccaagtagctgggattacaggtgcacgacaccacgcctggctaataccccttctcttctcttctaaaggcccttgccattggattagggcccaccctactccaacatgactttaactcaattacagctgcaaataccttatttccaagtaagttcccattccaggtgccaggggtcaggacttggacatacttttctgggagtacgtcccacaacagaaagtaagtactgtggtgcaggccccatgcccagcagggagctgcagcctcccctcagccacctgtggccccggggacgggcctgtcctcccctcttcccctgcttctcagtgtgtggacatcatgatgcttttgctttcgtcatttgtgtgattgcatcttggaaccaagtgctgtttgcacgtgcaggtgggctcccaggcagggggtctctctgagttggcctgtttggaggtttgtcccagccaaggggcccacctggctgaacccaccctgctcagggctgcatcctgtttccctgttgactttgctgcagcccacgctccttcctgccactgcttgtggttggctgctgtttggagctgtccccggcattcctgcacccgaagcctgggacaggtgtacgcttatgtgctggcagcggttggcggggggggtgtcgccaaagagcggggatgctgagaatggtccccttgctgggctgcaggtggggagggatgcctccgggattcccagagtcactggtggcatgtgccccccgctgccctgcccagtgccccgccctggggaccctgtagtgagtgcagcagccacagcccacccttgttgggggctgtggtcttagggtggggacatcagcctgagggtcattattggaggtggggccagaatgtggctcccgaatgactctttttttttttttgagacgcaatcttgctctgtcacccaggctggagtgcagtggcacgatctcagctcactgcagtctccacctcccaggttcaagcagttctctgcctcagcctcccaagtagctgggattacaggcgtctgccaccacacccagctaatttttgtatttttagtagagatggggtttcaccatgttggccaggctggtctcaaactcctgacctcatgatccacccaccttggcctcccaaagtgctgggattacaggtgtgagcaactgtgcctggccggctcctgcatgactcttagcccaggtgcagcccagcaagcattagcgtgtggagagcccagcgggcattagtgtgtggagagggcatggctagtataggggctagcgagtagagcatgctgtgtcgtctttcctgtagagctggagtgacctgctcaggtgggaagtttggagagactccagctgagtggtttgggcgctgcagggttaacttgagaccccagtaggaggcttctgtatttgtccaggcaagagaagatgtggcttgggccagaatgaggacagaagaggcgagagggcagaagaggtgctgggacatgggggagccaggtggggcatggggggttcctaaggaagggacaggtttgggcagttgtgaatgtgctcgtgtgtgtgcaagtgagtgggagctggcgtgcaggcaggacaggagtgcaggcaggacaggagtgtgagcatgtgtgtgtgcgtgtgagcatatgtgcatgcacgtgcatgaatgtgtttatgtgactatgtgcattgctgtgagtgtgcacacatgtggctgggtgcatgtgtgtgaacacgtgtgatgtctgtacagcctccctggtgggtgactggcgctgggctggagacatgagtttggggagctttgagtgaggggtgatggtggcactcccagggtggggctgagagggggctgctgggcttgggagtggagggcccaggggaagtctttcccctagcaccctctcccagggtcttcaggctgtgtgggagccaggactgggtctgtctccttgtggcctctgtccttggtgcagtaatgaccactgggtagtggcccttggggtcaagggcatccctggagcccttgccatagatgctgagctggagcagggctgccaccccatactgttcaggggccagtccctcccctctggagctgatcaccccaaacactgtcccctcagaagggtcgtagtgctcactcacaggagcctgtgtttctgcctgtgtgtggggcactggggcccagagaggcagacacagatgcgtgcagccaccagcttggatgcaggacccctgggctcaaacactgccttccagtctcagcctacagtgagtatgggcggggctggaggatgcagctcagagaggagggtgcagggttccggggtgggccaaatgccgggtgggagcagagcagggccgcagggacatgggagggcctctcgcaggacggtttctcatgccagccctggtcaaggcagcagtggtttccagacacgggggtgcgtgtgtgaggcaggaacagtacaagcagagggcccctggggagaaggcctttgacagcaggaagaggacctggcagtagggacaggagtgagggagaagaaaaagacagcagggcctgggcagccccgtcacggggctggctttgaatcttacttatctattgttgaggtgaacaccacataacataagattcaccatctgaaagtgaacagttccatggcgtttggcgcattcacagtattgtgcaggcatcacagctatctagttccagaacattctcatcatccaaaggagaccttgtccccattagcagtccctcccctcctctcctccccagcccctggcagttactaatctgcttcctgtctctgtggatttgcctgttctgagcatttcagatcgatggaatctcacaccctgtggccttctgtacctggcttctctcactcagcatcacatgttcagtttcatccacattgtagcatgggtcagtgcttccttccttttttgttgttcctcttgagacagggtctcactctgtcacccaggctggagtgcagtggtacgatcacagctcactgcagcctccacctcttgggctctgtccaacctcccacctctgcctctcgaatagctgaaattattggtgtgcaccaccatgcatgcctggctaattttttttttttttttttagaaacagggtttcaccatattggccaggctgctctcaaactcctggcctcaagggatcttccctcctccgcctcccaaagtgctgggattacaagtgtgagccaccgtgcccagccttcattccttttcatggctgaatcttattccactgtatggacagaccagtcttattcattcatcccttggcacacacgtgggttttcccaccttttggctgttgtccattgtgctggtacacacactcatgtatgattgtcttcatttcgtgggggcatccgtccaggagtgggattgcttggtcataacagcagctcagcatgtcacttgttgaggaaccgccatacagattgggggtttattttaaataggatggaagcctactggtgtgtttaaaacgggagcataacacgatttgaactgaatgaataaagagaagaaaatgaaggagtctcggcagccacttgcagagggagcagggaggcctgggaggaggtcacgtgggtgtctgggtgcgagatgacacgggctagtaccagggagggggctgacgatgggccctggaagtcgagctgctgggaagtgatcatgggagtgatgaggcaggcagaggaaagggacacctccagcctctgtccctgcttcttctaccctggcgggcgcagcctccaactagtgacccctcctctgggcttggtccttccctgcatcgtgtgtgtctgctgggcactccaaatgtggtgcctggccccgctagcccagaatgcggcctgaagatggtgagacaggcaagggctaaccccaccgggtccccagggcctgcagcaggtgccacctggggcctggctaggagttcaggggcctgggtgaagcctttgggacagggctgtgagggcactcaaggggtaccaggtgggccccggcaggcccaggatctggccttccaaatcacaaaatgacttttggtgttatgtaactccatagtcaagctatgtctaaaaaatggagcataaaagctattttgggcccatggtaatgagggcatctcgcctttgtcttagccgtcctggggggaggcagcgtcgaaagagctgctcagagaggcgggttcagcccagaccccaagcaagccctgtgtcagcaggcagatgccgttttcaaaaatcatttgttccgcctcgaccggaggtggctcctggcagatcgccccgcggtgctcagaatcccagaggcctgcgggcggctgacccggggcgagcagggctgggcctcctctgccgtgtctgggatctgacttccctgaggttaggtccggcacctgtcagaaaccaggcctgacattttcaagatgggcacaggcccgctccgggaaggccccaggcccgtccatgtgggcagcgtcggcgtcgggcttcttgcctgggacccaggggccgctcttggggagggagaccctgtttcaagtggccagcatccccgccagtggtttgcattattcaattggtgataagatttaaaattaaactgcaaaggatctgttcccccagctacaaatagacgtgtgcttgcacattccagaacacaagtgtgcaccaagagatgtgttttgagtcaaggtggagaaaaagtgagtttttttgttttgttttgttttgtttttgagatggagtctcactgtctcccaggctgaagtgtagtgacgcgatctcgtgtcactgcaacctctgcttccctggttcaagcaattctcctgcctcagcctcccgagtagctgggattacagatgtgagccaccacacctgactaacttttgtattttctttctttctttctttttcttttttttgagacagtctcgctctgtcacccaggctggagtgcagtggcatgatctcggctcactgcaagctccgccttccgggttcacgccattctcctgcctcagcctcccgagtaactgggactacagtcgcctgccaccacgcccggctaatttttagtgttttttttttttttttttttttagcagagatggggtttcaccatgttagtcaggatggtcttgatctcctgaccttgtgatccgcccgcctcggcctcccagagtgctgggataacaggcgtgagccaccacgcccggcctaactttggtactttcagtagagacggggtttcatcatgttggccaggctgatctcgaactcctgacctcaagagatccacccaccttgacctcccaaagtactgggattgcaggtgtgagctgctgcacccggctgagttttggaattccctctctttctctctgctcatgtacactatgtgcacgcatgcatggggccctctctgcccgagtacactgcctgcacacatgcgtggggccttagtccttcctttcctgttggtggctgtaacaaatgaccacaaactgggtatcttaaaacaatagaaatgtattcagtgcaggtgtcggcagggctggtgcctgcaggaggctctaggggaggatccttcctgcctcctccagcttcagtggctctaggcgctctttgcatcactccagtctctgccttcattgtcatgtggacacctcctctcactgtgtctcttctcatcttctgaggatgctagtcattggatttaaggcataccctactccagttcaacctctgttttttttttttttttgagacggagtctcgctctgtcgtccaggctggagggcagtggcgcgatctcggctcactgcaagctccgcctcctgggttcacgccattctcctgcctcagcctcccgagtagctgggacttcaggcgcccgccaccatgcccggctaattttttgtattttcggtagagacggggtttcacagtgttagccaggatggtctcgatttcctgaccttgtgatccacccaccttggcctcccaaagtgctgggattacaggcatgagccaccacacccggcctttttttttttttttttttttaaacaaggtcttgctctgtcgcccaggctggagtgcagaggcacaatcatagctcacttcaacctctgcctcctggggtcaagcgatcctcccacctcagcctcctgagtagctggaactacaggcgtgatccaccatgcccagctaatttttgtatttttagtagagacggggtcttgctatgttgcccaggctggtttcaaactcctgagctcaagcaatccacctgcctcagtctcccaaagtgttgggattataggcgtgagccatgcacctggcctcgacctgcaaagactctctccaaatacagtcacattcatagatggcggggttaggacatggctatgtgtttccaggggacacaggcaacccacagcagacattctgccaagtccatcatcactggcccttactgaggtcccccagcctcctctgggtctgcccaggaggtgctgtgacgtacttcaccccatgatccagcacatgggagtacctaggtcaccgtgcagccggggtctcagcagaggccggagtctgccctgagtcaccagaggctgtgggttttggggatatgcaccagagacccccacacctatgcatccgctgactaagttccagatgagattcatcccagccttgctgccatcctgccatggggagcttgcagccctgaatgggagacgagaaaacatgccaagcagttatcaacttgtctggggccccttggctggggagaggagacctggggtgtggacgcaggccacaggcatgccaggtgcctcccagctggcttcagagatgctgggggagtggattggagagtatcccccagacatatgcgcccatgtcctaagtcctggaacgtgtgactctggccttatgtggaaaaaaggtctttgggggtgtgatgaagtgaaagaccttgagatgagatcgtcttggatttaggattggccccgaatcccatgactggtgtccttatttaaagaggagaagacacaggcacacagcgagaaggccacgtgatgaaggaggcagagaccagagtgatgcggccacaagccaaggaggccaaggactgctgacggccaccagtttttgaatggacatgatgttcacataacatgaaattaagcattttagagcatgccgtggtggcgtgtagcacactcccagtgctgtgcaaccttcccttctgtctgcgcccagaacatttccatctccccagagggagacctcaccccgcaggtagtcactccccatttccactcccagccccaggcaaccactaatctgtctctgtggctttgcctattctggatatttcatatcaatgaaaatctgacaccatgtggccttttatgtctggcttctgtcactcagcatcgtgttttcgaggtttgtccatgctgtagcatggatcagtgctacagtcttttttttttgagacagggtcttgctctcttgcccaggctggagtgcagaggtgcaatctcggctcactacatcctctgcctcctgggttcaagcgattcttctgcctcagcctcccaagtacctgggattacaggcatggggcaccactcctggctaatttttgtatttttggtagagatggggtttcaccatgttggccaggctggtctcaaactcctgacctcaagtgatccacctgccacagcctcccaaagtgctgggattacaggcctgagccactgtaattgcccggcctacaatcatattttgttgtacggatggaccacattttgtttatccatttatttggtgggttttgtctttcggatgttgttaaccgtccacctaccgtttgtaagtttgttgacatcttatctccaatctccccatggggagagacggagacctgtctcttcccatctgccttagcatccttgcttctgaagacagctctcaggaagtagcagggcgtgaggaagggatgaagggtgggtgtctgtgtcaccacagcccagaggtgcggagccacgtggtgtctccatgctgtggcttaaagtgttggaagtttgtggccaaggccagttcaccggggaccccaggtccagtatgggtttcctaacggtgggcttgcgtcacattagataaaagacctgagagagaactctggagggcaagggggcatctggttggtatttctgcctgattgccatttgtctggggcctggagagggagccttagctatgtgtttcgatgtggtcagatggcctgtgggcaacagggcagttgccctgcagggacactggtctcagatggagtgagacagcccctgcgtcgacccaccttgctgcctgtgccagctccacagcagcctcgtcagtgtggggcacattgcacacgccaccgtcatctcagttgtccccgtgcgcttggagcctccgggagggaggatgcacgttggcgtgttaatggcgatggcattccaccgtcaccccaggcagaagcagacactgtatgctgcacttatgagacatgtgaaacctccctgcacagaacagagcatcccacatatgtggtcatgggagttgagagagcgacaccgtgagcccaggcttgttccctgggctccaggcgggaaccggcggggcggacaggctcctcggcagcatcgacacggctccctcgtcccctctgcagatggtgaggccccaggagggagcagtgacagctgatcagtctgtggggtggggtgtgtgggtgcgtggggtgttgttctctgcactcgctaggagtcaatttcattttcatcttagaggtgatgggttgttgctgtgtgtggggggattccatgatgagctggctctaggatcaagggacctggggtgttcaggttctcagccctgccctggaaggggagacagcagcacctattgggactggggggccatgtgtgagtttctggtggctgctgtaatatattaaagtactacacctgggctgcttagaacaagaatgtcttctctcatggttctagagcctggaagtctaaaatccaggtgtcggcagggccgagcttcctctggaggctctggggaggaatctttcctgcctcttccagctttcagtggctccagccgttccttggcttgtggctgcatcgccccaatcccggccgtccccctctgcatctgtgtctcatcttctgtctcttaaaagggcagcagtcacccgatgtagggtcctcccggctaatctaggatgatttcttcatcccaagatccttcccttaattatgtctgaaaagactgttttttcaaataaggtcatactctcaggttccagggatgaggaggtggatataaccttttggggacaccgtgaattcactccccagtagctgagctgacctgcatcgagcgcttgggatctgcctctcaccctcttggttgccttggcagttccctaaggcctctgaccctgtcaccccctgcccagcttccctcagcacactggccccacccaggagcgctcctgttggtccgtcccttggacccgcctggagctggggggtgtcccctttgtcctgagtacacacccaggagacccctgtatgcttcaccttggggagctcagtatcttttcttcatagcactctaggccagcgtccctgtgcgagacccccttgctccctagtgcccctgcctggcccctcatggcaatgctgagggggaggcctcctgtgacctctgacctctgcaggcctctgcacctccagccccttctctcccccagctcgggcctgaggccagcaccccttaggtggcttgatccatctcagttgtccctccctgtggcctccagggagcccctgtccagctcccagaatccttgctctctgtcatcgcttggtttctgggttcctgcctgtctctatcctggagaggagaaggaggaggacccagaacctaggaggcctcggccaccctcctggagcggaggttggggcagcctggccagccgtccccacacacgggcccctgggttcagcgttggagaaggcatcagtgccagacctgtggctatgcgtgctcacaggggcaccaggctgccggctggacctggcttggccacttgcatccctggggaggcctggccgtccttggcgccagcccctcctccctcttcctgagcctcccacctctctggcctgtgttaggggcttctttctcctcttctgagtctaattctgtctttctcgcgtggctcaggtattccgccaccttcccccaacacagcctgcatggtctccctctcctggcttacagggtccgcctcggccctcccgtgttctggagaattcctctctccccgtgtgtcgcgcttccggggctgccggtcaccctggctgctcctgctgcccagatcccctggggacatcccagggacgggggccacccagcctcagcccaggtctgcctgtgcccatgcagatctgcagtaaagatgttctagaaagtgcttcctcccgactcatgtaccgcgccctcgatcttctctggagttgaggccgggccctggaacaggctccagctccttgttctcccagctggtgatgcaggaacatctttgcgcataaatctgcgttctggatgatttccctcaggagagcttcccagaagtgggattaccaggttagagggcaggaacgttgctcaggcactcggcggacgctgccaaatggctcagccggcgctcccagccacctgcctctcagagccccatgcatttccagcaccgctgacgtgtgccggcctcgcttcacccctcggtccccgggggacagcagaggaggcccaggcccgggaggggagctggctgccccagaggagccctcaggcggccagctatagggatgaggtgagagccatgggcatctgcttccttgggatggttcttagagtgggctggaggtgacctggggtttggtgagtgtatggggttgaacagtgtcccctcaaaagttcatgttcatccagaacctgtgagtgagctcatttggaaatagggattttacagatggacttaagtcatgatgaggtcattatggaatagggtgggccctaaatccagtgactggtgtccttataaagaagacaaaggctgggcgtggtggcccactcctgtaatccctgtactttgggagaccaaggcgggcggatcatgaggtcaggagtttgagaccagcctggccaacatggtgaaaccctgtctttactaaaaatacaaaaattagccaggtgtgatggtgggtgcctgtaatcccagctacttgggaggccgaggcaggagaattgcttgaacccaggaggtggaggttgcagcgagccgagatcgtgccactgcattccagcctaggtaacagagaaagactccgtcttggggaaaaaaaaaaaaaaaaaaaaaaagaaggcaaaacaggccaggcacggtggcctaggcctttaatcctagcactttggaaggccgaggtgggaggatcacttgaggccaggagtccaggtctagcctgggcaacatagccagaccccatctcagcaaaaaattagaaaataattggccaggcttggtggtgtgctcctgtagtcccaactactcaggaggctgcagcaggagaatcacttgagcccaggagttcaaggctgccatgagctatgattgtgctgctgcactccagcctgggtgacagagtgagaccctgtctcaaacaaacaaggcaaaacagaggcacagggacagaaagggaaaaggacaaggtcaggcacggtggttcacgcgtgtaatccgagcactttggtaggccgaggcaggcaggtcacgaggtcaggagatcgagaccatcctggctaacacagtgaaaccctatctctactaaaaatacaaaaaattagttgggtatggtggcacgcatcagtagtcccagctatgtgggaggctgaggcaggagaatcgcttaaacctgggaggtggaggttgcagtgagccgagatcacgccactgcactccagcctgggtgacagagcaagactctgtctcaaaaaaaaaaaaaaaaagaagaagaaagggaaaaggacacaagcagacagaagcaaagaatgaggcgatccgtctacaagccaagaagtgctaaggatggtcagcagccgcaacagctgggagagaggccaccttgcttttattttatttttattttttgagatggagtctcactatgttgcccaggctgaagtgcagtggcacaatcttggctcactgccacctctgcctcccaggttcaggaagttctcctgcctcagcctcctgagtagctgggattacaggcgcccatcaccatgcccagataattttcttttgtatttttagtagagatggggtttcaccatgttggccaggctgatctcgaactcatgacctcaggtgatccacccacctcagcctcccaaagcgctgggattacaggcgtgagccaccgtgcccggcctccaccttactttcagagcctccagagctgtgcgggaaacatctctgttgtgtcagccacctggtttgtgcttatttgttacagcagcctcaggagactgatatcatgcccaagagttggggatggaccaagggggactctggggtcaggacaagtgacccctcccctggtgtcctggccctcccggtgaggttgcacagaggttgggagaatgtcccgtcccggcccatctctgcctctccacccccttatgttactaggtgaagaattgtacattagcctcatttgaaactttatttccaggcctcttcagcttcaatcgctgcccaggatgcattgtgggtaagcaaaaccaggacaatgggcttgggcttaaaagtatcagagatcccgatttcattcattcctgacaccaagtcacttgaaaaagcagtcgtaacatcacagagcagctccggggaagttctccgtgccttatcctctttttttaatttttttggagatggagtttccctcttgtggcccaggctggggtgcaatagtgcgatcttggctcagtaacctctgcctcctggtttcaagtgactctcccgcctcagcctcctgagtagctgggattacaggcatgtgccacgacacctaactaattttgtatttttagtagagacggagtttcatcatgttggccaggctggtctagaactcctgacctcaagtgatctgcccaccttgacttcccaaagacctcccaaagttctgggattacaggtgtgagccacctcacctggcctttttttttttttttgagacagagtcttgctctgtcgcccaggctggagtgcagtagcacgatctcagctcactgcatcctctacctcccgagttcaagtgattctcctgcctcagcctcccaagtacctggcattacaggtgcctgccatcatgtctggctaattcttgtatttttagtagagacagggttccaccatgttggccaggctggtctcgaactcctgacctcaggtgatccacctcccttggcctcccaaagtgctgggattacaggcgtgagccaccgcacctgcccgccttgttttctttagaagttggttcaggctggccgggcgcggtggctcacgcctgtaatcccagcactttgggaggccgaggtgggcggatcacgaggtcaggagatcgagaccatcctggctaacgtggtaaaaccctgtctctactaaaaatacaaaaaaattagccgggcgtggcggcgggcacctgtagtcccagctactcagggggctgaggtgggagaatggcgtgaacccgagaggcggagcttgcagtgagctgagatcgcgccactgcactctagcctgggcaacagagcgagactccgtctcaaaaaaaaaaaaagaaaaaaaaaaagaagttggttcaggctgggtgtggtggctcatgtctgtaatcctagcactgtgggaggccgagtcaggaggatcattggagctccggagtttgagaccagcctgggcaacatagggagaccgcgtctctactaaaaataaattggctaagcgtgttggcctgccgctgtagtcccagctactggggaagttgaggtgacaggattgcttgagcctggaaggttgaggctgcagtgagccatgattacaccactgcactccagtctgggtgacacagcaagaccccatctttaaaagaataataataataataataagttggttcagtttcatttgcttggaagccccttcagttcccagccccgcagccctgtggcctcccccagaggtggtgtccacactccttatcctcgttcttggccctgctggagcctgtggcagattcctggggttgcctgtgaaaccaggagctgtgactcctgcctgggcctcagtgattatggtggggtcacgcactgggtgccagggtctgccacaccccacccaggggccactgcccagcagcaagtgcacttagccatgcagctccccacacagatcgaggtgggatggtgctgggtgccagccatcctgtgcttatgtcctgtccaaggccggccgtggcttctgatggcttaccctgggaaggtggcctgcaccttcagctggccctgctggtggcgttggtggggatgggctctcctgagggcctcagcagcccttacgaggtaagggctttttgccgtgtgtagatcccacgaagcacatcaccagctcctcactcagggtccctcctgcctcccctggatctgctggggcatgtcccaggcagggggcgcctggtgaacaccgagcccccctgcttcacacgctacctggtgcagcccctggactttggggtggagtcggggtcacattcacagggccttccgggtaggcctgtcttcaggatgggcccttctcccagtgtactggggcccccctacgccctacagccctgccgtggagtcaccggctgggtgttcgccgctccttgtgctgtcctggtttgggcttcatctgcaccctccccgtccctctgcagtgactaccatgagagctggcctggcctggtctctgctccctgtgtccagcctccactcccacccctgcagttcctgctgcccgacccgctgcctacctcatccttcatcccggacggttcctgtaaccacccctcccaactccctagtctcaggatccctgccccctctgggcccttattgaccctactcttcagccagtggtgtcccccttggtccccctactcctggggaccagcccagaagccaccagtggcccccctggctgtctcctcctggtgtgccccgagtcgtggccttagttgagtcccatgtccagagggagcttggagagggaagggcttgtcccaggccctccacagttccggggctgagtatccttccctccctccctccttccctccttccctccttcccttttttaagagacagtgtctcgctgtcacccaggttggagtgcagtgagtggtacaatcttggctcacagcaccctccacctcctggactcaaacagtactgcctctgcctcccgtgttgctgggactacaggtgtgtgccaatgtgctcagcctgggctaattttcttaggctgccatagcaaagcaccatgaatcaggtggcttaagacaatagaaatgtcttgtctctcatctctgaaggccagaagcctaagatcaaggagtcagcgtggctggttcctcctgaggccatgagggagagccagtctcaggcccctttccagctcctggtggcccagcgatcctcggcaggctcttgacttgtagacgcggcaccccgatctctgcctttattgccgcttggcccactttcctcagtgtctctgtcctcccctctcatgggggcaccagtcattggatgcagggacctccttaattccaggatgatctcatttcaagatcccgcactaattacatctgcagaaactctctcttttcaaataaggtcacgttccgaggttttggtggacatgagtttcaggggagctgtgagtccatctaacacaggacccgattcatcctgggctgcctggccttgaactctgggctgctcctgctaccttgtgctgcctccagctggacagcaggccccccgctagcccccttgcgtccccagcccgtgaaccccaccgagcaggcacgttgcttatcttcgggagactcattccagaaacaccgcccacagcttcctgctcgtcacacctcggctgcctggctgccccggggggtggggggaaggcactgctggtcacctttgtaccacagacacttggccctttagggctagcgcacactggagcccgacccaggaaccccctctcctcacccaccctgcaccccgggggctcctgcagggagagtcctgggctccgtgggcttcacctgggtttggctgcctgtggttgccccctgatgacttgggatgtggggcgattctgggctgcccagtttcagatacacctgtctatggacagttcctgtaattcctgggggtgatgctgggcccccaggggcagggcatgttggcctgcagaaagacacaggcaggcggcttatttgtgagcaggtgccacagactgaattctgtctcccacaaactcacaagttgaagccttcacccccagcgaggctgtatttggaggtggggctgttaggaggtagttaaggttaaatcaagccataaagggggggtcccgatctctaggattggaggccttgtaagaagaagaagagagatctctaagcacacacagctgggagaggccattcgaggactcagaaggttggccccccagggccaggaaaggcgctgtacctggaacctggtctgggtactgctgggccctgatcttggacttccagcctccagaaggaaggcattctgtccagaggaagacatttctgtcatttaagctgcttggtctttggtattttatcatggcagcctgggctgctaagacagaggattattttggatgcagggattgggggtctggcagggcttcctggggaggtagtgcttgaactgagtcccagatgatgaatgggaactgttgtggaaggttccagacaagggcttcgtgggtgcagagcccagcagcaaaaggcagaggagggccttgagtgccaccagtggggagttggggtttgcctctgggggaaggaaaagagagctttaaacctggggatactccagaagcctttcagaataactacaggaggccgggtgtggtggctcacacctgtaattccagcactttgggaggccaggcaggaggatcacttgaggccaggagttcaagaccagcctgggcaacataggaagaccccatctctgaaaataaaaaacttagttgagcgtggtggcgggcacctatagtcccaactactcgggaggctgaggcaggaggatcatttgaatccagaagatggaggctgcagtgagctgtgttcactccactgcactccagcctgggcaatagggcaagacctgtctcttaaaaaaaaaaaaaatgatgacaagagacagccctcccggctggggaaagagcctggattgtaactgaggcccctcctgtcttcccttagtgcctcaatttaccagcttgcaaaataagggtacagctgtgtctccctgctcttaggactgctgcaaggccccacacagggtgggcgcttggccagctggcagggctggagtctcttttgtggggagggaggcccctgtgagccagctgtgtgcgctcagcccccgagggacccttcacacgtcccagccgccacctacaagagaaacaaaacgtgctcacggcagaccctctgttcagctgggtctggaaatttggcagcagcaaccatgcctgataaaaggcattccgaggcaggcctggtgtttgtatatgtggttctgtatttacatgagtggagggagcaaggaggcagcaggggagtgtctccagggcccaggagactcagcctggaatccacgtgcccctgatgctctcatcatcattccctatcgcttcccaagctcggcagatgtttactgaggaactctggtggaccagccatgcagcgaggggtcagctcagctcttctcatcaggtcctcagtaaacgtggggacccacggcatggagggactgaggcaaaaacaaagttgacagccagaatgaactcagaatgggccaaagacctaaatgcaagagctagaagtgtaaaactcctgtaagaaaacagaggggctggctgggcgcggtggctcctgcctgtaatcccagcactttgggaggccaaggatcacttgaggtcaagagttcaagaccagcctggccaacatggtgaaaccccatctctactaaaaatacaaaaattcgccgggcatggtggcgcgtgcctgtaatcccagctacttgggaggctgagaatcacttgaccccggcaggtggaggttgcagtgagtcaagatcgcgccactccactgcagcctgggtgacaagagtgagactccgtctcaaaaaaaaaaagtccagaacagataaatccacagagacaggaaacggattagtggctgccaggggctgggggaggggaatggggagtgactgctgatggggatggggtttctttatggagtgattgaaatgttctagaaccagacagaggtgatggttgacagtgtactaaatgcctctgaatcattcactttcaaacaagatcatggtaaattttttatgtggattttattgcagcttttttgaaagtatatttttcatgtaaaagattaaaaaaaaatagaaagaaacaggccacagagagaaaccaatggtgggccgggcacagtggcttacacctgtcatcccagcactttgggggccaaggcaggaggattgcttgaggccagcctggacaacatgggggaccctgtctctacagaaagaaaaaaaaaaaaaaggccatggtggtgcacaccactactcccagctacttaggaggctgagatgggaggattgtttgagcccaggaggctgcagtgagccctgatcgtgccgctgtactccagcctgggccacagacaaagaccctgtcgcaaataaaagaaagaaagaaaacagatgcgggacgtcagtctcaggctgtggccttgctgctccaagctgtgttcccacacacacagtttccagaggtgggcagtggcaacaccctggggagggtccgtcagggctggcagctcctgctacacagcaggtgatcccctcagtcactagcctctcctgttcccctgggacccagtgcctggaggtgggcagcagctcccacattccctgtgtaccctgcggccattacccagccccggcctctgggagaatgaatcggtcaggggatgctgggcatgcatcccttacccctatggcgaggcgtccgggcagaaaatcctcccccacaacacgcacaggtgatggcgacgggcttctgagcaaaatgcgtgagatctggggctctttgctgggcccttggaggagcacaggaggaggcttgagggtcagacatgggaagttctatgtccacaagtcaggggcagaaggctttgctgcagcctccgacatcacttggagctttgggggtacctgtcagagacttggatgccccagggctgggcagaggcctgagggctcttgtccctgtctcccttctcacactggcatcagcccctcctggcattggggatgccatccctgctggtgcatctggttaaaagctggcctggagggtgttcacctcctttgttctgcttgatccagggcagtgacaaggggaccccccggggagcgggggatcctgagcatggcactggatcgaggcgcacgccagctcctgcaggcctcgttttgaagccgaggtctcaactgcagggagcagatggcgtgtcccctgggagtgctggggtgggggcggtgacagggctgtggggccggctctgggcagcatgggcaggtgcggcctcacagtagaggcctggagcccttaggggaagagtcctgctctggctgttgatggtaagtggctccagaagcttccgttccctcgatgaccgtatttcacccctggtggcccatctcagaccctatgagctcccagtcctgggccttggcacctgctgttcctcctcccctgcaaggctccccagtgctgtgtctctgccagtccacggccgcacagtggctcaggctgaagctcccacagtcaccacttgcctggagatctaatgcttgctgcccgctctgggctgtgggctcgtgtgagcagtgcccatctggctggctggctgccatgtccactgaacctagaaccatgcccagtgctgggcagactcttgccttgagtctggcaggggaggtggggacactgccgtggtggggcgggagctgggctggctgagcgggtgggtgcctgagccttggttggttttcagctgttgacccagctgggcttcacgccagcagcaggggttccagccagcgtggacatgggaggatgaaggctcttgccctgtgggggtgtccttcaagtcggcacacatccccgcctgcggctgctgggacgcttggagatccctccaaggcccaggcctcctgccttcattccagggtccctctgccttcatcagccttcccagaactccatcttgggaagccccgagttatggggctgcagggtcaaggggtgcgaatccccggggtcctggtcagctcccaggatccaggatccaggtacatcctgtgcattcgctgggctggagaaagtgttcgctccccaccttcctcttgtagggccatgcctcaggctgaggtgcctgctgcctctgctctcaggcagtctctgtgctttcttgagcctcagtttccccatctggactgtcaggggaggggctgtgcagagggcggccccttggaggaggctcagtgctgggcagcggtgggcccagggggaagagccttctggtacaggcagcacccgtgcaaaggcccggaggtagcgactggtggctccgggaggaagcatgtgagctggagcctatggtcatggagagtggagactagactttgaagcctagaggtggagagggggggaaactgaggcctgactggcacagacagcacttccctccctggcccccccacagggaggccctgggtctgccacggctttgcagggccgagctcagccatcagcccgcctgcttccctcaatctcattagaaggttggccggttgccatggcagttgcttctgggcctgaccaaggctggccggtctgcagagcgagccccaggaagggctggcaggtggaggtgtcgctgtgccctgtgcaggattcctgggagactgagtgctgcccgaacatctctccacatcctggagaagtagccacaggcgcattatactggggccacccggcctccattcccctacctaggggctcctgctccatccagccctgtggacacttcctgggcggggcaggggcgtagacttagcaggagtgtggacgtgggcacagacagaggcagaggtgggcgttctccagggcgagggtcctgtcagcaaggggtgggggtcagcggaggcctgagaagccacctttacgaagggctctatagaggggtcaggtgggggggtaggactttgtgtgagggggtcccggcgcaggctgtatcaggagcgggggtccctgcggtcagcttggtagtgtcagagcttctgggtccacatctgcctcccacgtgcctccactgatgctggcaagctctcatctgagatcgggtggcttcagtaacacttgtcccaggaggggccatgtgacttcagtcatgctggtcatgcaggggttaagtttcaggcatgtggggcctcagttttcccatctggagagtggcatgtactggtacaccctcaaaagccctgtagaggggtgaatcatgtcccacaaaaagatacgtccacactctcactcctggaacctgggaaggtgaccttacagttgactcttgaatcaatggttttgagccacgcatgtctactcatacgtggattctctcccgcctctgtcatgcctgagacagcaagaccaagctgccgccctcctgctgctgctcctcctcctcctcctcctcctcctcccttttcctcctcctcagccagctctacgtgaaggacggtgaggacaaagacctttgggataatccccttccacttcacaaatagcaaacattttctcttccttaatgattttcttagtatcattttcttttctttagctttattgtaagaatacagtatgtaatacgtataacataccaaatctgtcttaattgactcatattatcagtgaggcttccagtcaacagtaggctattagttaagtgttggaggagtcagaagttatactggagtggggcacggtggctcatgcctctaatcccagcactttgggaagctgaggtgggaggactgcttgaagccaggagttggagaccagctggtcaacatagtgagactccatctctacaaaagttaaaaattagccaggcatggtggtttgtgcctgtggccccagatactcaggaggccaaagtgggaggatcacctgatcctgggaagccaaggctgcagtgaggtgtgattgtgccactgccctccagcctgggtgacagagtgagagcctgtctcaaaataaataaatgaataaataaatagaagtaaaaactataaaaagaaaaaaaattatacttggatttttggccgcatgagggtcagctccccaatccccgtgttgtctcagggtcaactgtagttggaaatagggcctccagatgagaccgtcctggattagggtgggcctttctctttaattgtaagagaaaggagagctgagccaggcccagtggctcactcctgtaatcccagcactttgggaggctgaggcaggcggatcacctgaggtcaggggtctgagaccagcctggccaacatggcgaaaccccatctctactaaaaatacaaaaattgtctgagtgtggtggcacgcctgtaattccagctactcaggaggctgaggcaggagaatcgcttgaacccaggaggtagaggttgcagtgagccgagatcgcgccattacactccagcttgggcaacaagagggagactccgtctcaaaacaacaacaacaacaacaacaaagccagaggctggtgcgattgtgacttggggggctgcttcttgagcaggggtgttggggatgcccctctaaggaggggccgtcaggccttgcatgaggggtcagtggggaaaggacaagctgggggcactttggggcttgggcggctggagggagtgaggctggggaggctggaggcaaagcccacccaccctcagcagggccctccaaatcgccagtggggtccactctcacagccaggcagccaggaccagatgcccatctatctggcccacaggccatgagtgaggggcgccctgggagctgcagttttcccgactcctaccggacgccttctccaggcctcagctgtttcacctgtcgccccgcttgttgacagccatggggatggtgtggagatgggacacctgagtcccaggtcagccccgagcctctgtgtagggcaggctggagctgctgtggcatcccaggagctccctccagagctagccgctggctccaagtgagggttacaccttgaggtggcttgtgttgcctgggccagctgaggaagggggtggccaagctgccgcctgaggcctcctgggttttaatcttaagtgcttgtacagcctccagacgggcctgtcacctggcttgtgaagtcagctgtggaggaggtgcagcagcgtccattcattcattcattcaccccctcacatctttgttcacttgtggattccgccggcaggcgctgctgagcagcgggtcctgggctggctgctgggttcacggagctcgtcctcagggtctcagtggtttggggagcacagcatggtggggggcaggggactgtgatgtggcgatgagaaaagctgtgatgttgcctgcagtgcagtgacatctggccgttcttccagctgaggccagaggtctgtgggggcagagcccaagctggcgtcccaccaccctgagaccccagagaaaggaggaccctgctcccaggggttccagccaggctggggaggaaagtcagctcctgcagactcaggagtctccgtgcccaccctctggctagaaaattcactggaaggactccccagaagccgttttgttcatgcttatggtttattgcagcgaaaggacacattaaaattacccaagggaggctgggtgtggtggctcacacctgtaaccccagcattttcggaggctgaggcgggcgaatctcttgaggtcaggggttcaagaccagcctggccaacgtggtgaaactccgtctctactaaaaatacaaaaattagctgggtgtggtgttgcatacctgtaatcccagctactcaggaagctgaggtgagagaatcgcttgaaccctggaagtggaggttgcagtaagccgagatagtgccactgcactccagcctggatgacagagctagactccatcttaaaaaaaaaaaaaatcacccaagggaagaggcagatgggcagggtccaggagaaaccaggccagaacctccagtcagcccctcatgtgaacagtgcgtaattctcccagcatggagcactgccagccgcagaagctcccctggcctgcatgtccagggtctgtactgggggctggtcctgtagacgtggctgaccaccctcatggccaacctgtctctagtccctccagatgtcaagctgatgtgcccaaactcccaccctaaaaccacagtgtgagcagactctgccatagcccaaggcctcaggcacacaatgacactcttatcaggcaggatattctcctgcaggtcacctcccaggagctggggacaaaggtcagacctctcttggggccagcttaacccttttgctgtacaactcctcatgcaaaaccaagaatgagcatggggttccccaaaagaagagcagaggccaggcgcggtgactcattcctgtaatcccaacactttgggaggccgaggcgggtggatcacttgaggtcaggagtttgagaccagcctgagcaacatggtgaaaaactctgtctctactagaaatacaaaaaaaaaaattagccaggcatggtgcctgtagtctcagctagttcggaggctgaggcaggagaatcacttgagcctgggagatggaggttgtagtgagccaagatggcgccactgcactccagcctgggcaacagagcgagactccatctcaaaaaaacaaacaaacaacaacaacaacaaaaaagaaaagcagagtccccactcagtgtccactcctggcccaggggctgtgctccgaagcctgagtgcctccagcaaagtggacaggagctgggaattgtgggcaaggtttggacagagatggggcttgggaaccatgagagttctgtgtgtccccagtcctgtagattgtccccgcatcccaggtttcctgtggcccggggacatagtgtaaacaaagctgcttcagggagttcttgcccctgatgtctggcctcctgggagctggcagctcagcccgtgtagaaagcacatgtggcatgagtacctgctgtgtcacacgtcgtgtgtccctctcacacccgcctgtagcactcactctaggtcggggacacaggtccaggaggggtcacagcctttagggccatatagtcagtgagaggtgaatgtagcacaggtttctgtcatgctacttggacacagaagagggtggagaaagtcacgggaggccacaggcgacctatgcccaggtaggtgtggggtgggagctgtaggacccccaccctacaccccctccctctgccacagcccggagctggcctgtttcatctggtgtgactgctgggagggacactgtggatgttcattgtgtatgtgtctggccagcggccaccaagggctcccagcacagaccctgggcctcacccccaggccctcgagagccacccaataacacacaaggttaatcttaccatcggctccacttcagctcacaggaaacagctgtttacctgggcgaggtgctcagccgggcaggtggccagttcccgggctttacttccgcctccggtgtccagggccccctaggaagctggggcggtggggcagccagctctccacgcactgccaggagctgtttgtaaggaacgagtcggccttgttgtgtacacagtgtccaccctagcaaccgcccctgccgggccagagtggacaaccacccctccttcctgcctgcccagccccacctctcctcacggtggctgcctcccccagttgcatggcaggcatcatggaccagcatccccaagggcctcgggtcgtgccacatgggtcaggggcctctgttactggcaaatcagcatcagccacatgaaggggaggaggccagcttccagccctgttcagagtcagcgtgacccatcagggagctcctggcccctggttctgtgccccgatgccatcagggagtgggaagcagggatgcagctgagatgaaggcgctcagctgggcccagcccccaagaggctgggaaggaccatgaggaaggaacatggggctcaggaccctctagaactcaagctgggtctgggggactgacttggctgccctggctctgtgtgggctgccgtcgggatcacaagtcccacgctttgaaggccatcaccacgcttctgagacagcttcctccgattcaggccagtgggaagccgcctggcctgccaagtcacagcctctggccgtgataagaaatggctcccctgggctggtgaggggcctccttggcaggctgcaggcccgccagtgcctctcttgcccattcactgactgaccgaatcagcagcaaggcagccagctccccaggttcacggtcatgggtttctgcatggtgcattgccccgcctggggagccgtcccggcacctcgggtttctgattctgccatttttggtggagggacacctggtttccttaagcatctgggtcatgaggtcctgcaaacttctgcacttaggctgtcaatcccaccacttgggtctttttgtgcctttggggctggcactctgaggtgagcctgggaggtgacccctcccgcagctgctggcttctctctcgcagctccagctccagaaatcccagtacctgcaactgggccccagccgaggccagtactatggcgggtccctgcccaacgtgaaccagatcgggagtggcaccatggacctgcccttccaggtgagtgccccgccccctggccctgccccattgtggggagcttcccccagcctcccactgggggccagacattgaggacagctggggttatcagacagttggcggagcccacccaaccactgccttctccttgtctgccctgggaaccagaggaagcagagtggccccaccagggtgcccccgcagcccattccccatcagcagaccccgaggcgagccctccatctggcctccagcatttcggcagccgctacacctgttggccggctgtgcggcagcgggaaccgctcggggccactggggcttggctctgtcctgcctcactaatccgcaagcccagcaattctcagaaggaggcccggcggcctgaccccacttgtctgcaaacgtttcttggcagaggcccacacagcgcggctcccgcaggccgcacagccgccgtgcacagccttatcgtaaacaggagataaggcccacagcggccctcttccctgtccctggtctgcgggtggagatggggatggggtggggccgagggagctggcctatgaatcagggccacccccaggacggtgtctgggctctgcatggacaggtccccctgggggggggtcacacctactctgtggctgagaaaaccacctcggacacagccatggccactgacaggccagatggagccggggcccctcccaagtcacccaccagctccaccgccacctgcaccgccgctggacagggcagggatccttgggctggccaccacggtgcgcctcctccggcatacagagtgcgggccatcactgatgctgggcgtgttctttgtcacagcccttcctggccaggttttctcccctcctgcccttctctccctttcctgtttctcctgtcccctcttccctggaggagagtctctctctgggcaccttgcaagctcagcctgagtggggctgaggggcacaggaccctgttgggtgtctgtcgcccgaggcccacagcccggggggaggtcccacgcatcccgcctttggggccaggcaaggcagcagcgtctcaaagtctcggttctttgcattttcagcccagcggatttctgggggaggccctggcagcggctcctgtctctctggtaaatgagcccccaggctgaggccgcggcgtccccggcgccagcctgcaagaccccgacccgtgtgcgggcgctggggatccctgagctccccaagcggccgcccctgcggctcccagggaggtggaggtgtcccgtccgccaaatggaaatggatccactccgcacccccatctcgggaagtgcgtatggtcgcgtcgagaggccctggggactcttggggtccatctggggcagatgccatagccgcgcatccccatctggggtccagcagagcagaatcccagcatgtgccccaaagctgcatggtccgtccctatatacacacacacacaaacacacacacacacacacacatacacacacgtgtgcacgcatctcccaaaccaggccagcaggcaggacgtggcgagcccgggtgtggccagcccccgcttcattctgcctctgacttggctttggctgcctcagtttccctctgggcttcaaggcatctctggaaggagatgaattgcccctaccctgaggagcctgtgcactggacagcacagttcccaccctcatcgtcacaggcccacgtctcccatgcccacagccttttgggggcaagagccacggaaagacccaaaccagcagagttcatgctggatcgaagaaagacttgggggtccccagggctggggacagtagtcagccctgaactctggccgaggctgggacaaagcagcaatcctagccatggacaggcttctggagaggagactcactttagtatcagagtctcattttgcccggctgcccagagaaggcataagggctcaggggccagatggccggactgggggattggctgcatccaaagctggcagagcctgctgatctcaccccagtcagatggcaagtgggcaacacagggtcagggcgggctcctggcagccccgggggcatgaggccgggcatgtagcagggcctggggagggccagcctggtgccagccccaggtgctgggaggaagccccatccagccaagcagtgggccatggctccggaaggcgcctgtacttggctctggtggtgcctggagtgcctggaggaggctgcgggggagggtgtgtgggggccgcgtctcaatcaagagcagccctgggctccacaaggaagcctcccaggaactcgcgcttggccaggtgggccccgaaacagtcctgggctggaagcccctgggctgtctcttggcaggcccctccagggatgacgtaggtgggggtaggaggccgtccaggcccggagagagagggcggaggcctgtctgcacctggtgagactggggaggagggctgcctaggccggctacatccctggcacccggcgggcgctggccccgagcttgtgccgctctgcctggcctgtgcatgccagctgcactgcacgcccctgccaccctggctcccgggaccccagctcacaccccctccctaccccccagtgcttggagagccagggagctggggctgaaggaagaagcccatcccaggctgtggagcgatggccgagggtgctccagagtggggggccctgcgatcagactctggggccagcgctggggccacagctggtaaccattgtttggatttctctctctctgtttccatctcctcctcccccagacccccttccaatcctcgggcctggacaccagccggaccacccggcaccatgggctggtggacagggtgtaccgggagcgtggccggctcggctccccacaccgccggcccctgtcagtggacaaacacggacggcagatatccttttcaccagaggatgagggtgggggccaggccctgtcggtgccggcaggaccccaagtttacccagcaggttctgacagggctgcctgcttccagctctggggacagaatcagggcagcaccatctgggaggcttgatctcagggcagcctgggggacttcctggaggaggctgtgccacaagccctggagcctttggccagacttgggggctcaaggggcacagggaacagctctcaaggcaggagttgaggaaggttatacctgaccacagagggcttagacacctggcagggcagtggggccaggaaggccgtgagcagggagcccacagtcagggctgtgagctgatgaggcctctcctacgcgctgcacggagggcagcccagccaaggcaatggggctaagggggtctgtgtgagacccggacgcatccaagggaggctccatctctgtaagacaggagtaaaattcgcctctgcgactcggtcacgcagagatcagccagagtccccccctcccccccaactcagccgccccttggtgctcagccagccgggccccacaacaccagagtctgagcggcctcaggttgctcccgggatcccccggctctccagaacagagaagcttgttctccggttctcatttccgtgggctgggggagcttgaccagctgggccccagactgagcccttgggccccaggagccaccccgtcagcccaggatggagagtccagaccagggtcagctgaactcagactccacagcgtccccacaggccctactttcacagcccagaaccccctcccttggaaggggtgcagcccgcacgtgtgctcacggagcagagtgctgagtgctaggtggacagggctgtacccctggagagcccctggaacgggggctgcttgtagccaggcaggaaaggccggcaggaaacgccccccgccctactggtcccagctgtttgcaggcctcaggccgaccccagccagccagccggggcttcctgccctgggctgagagtgtgttgttggaggcggggtctcagccagtggcactgcccccttaactcacctcacgccgacagctgcccctatggcaccatgtacctctcaccacccgcggacaccagctggagaaggtcagtggctggacaccccccccccgcccccttcttgttggaaacaaaaccaaactctcatcatggttacatgtggaaaagcaggacacagtcgcttaaacaatgaccaaactaagatgcatccagaagtttctagaaattagccttcaccctgaaacacaggagttccagctttgggaggtcttctaacatttcccttccccccacttatgacaaaaaaaaagacaaaaacaaaagtgggaccaggagtggtggctcaggcctgtaatctcagcactttggggggccgaggcaggcggatcacttgaggtcaggagtttgagaccagcctggccaacatggtgaaaccccgtctctactaaaaatacaaaaatttgccagcatggtggcgcatgcctgtaatccccagctactcaggaggctgaggcgggataattgaacccgggaggcggaggttgcggtgagccaagatcgagccactgcactccagcctgggtgacagagtgagactccatcgcaagaaaaagaaagtgggacgataccgcatattcagcactgtagcttgctctttcctatttaatgctgtattcagagcaggtacccatgttactcaacagccattaaaaatgtgatgataaaattatattaacacatttaggatggaagattaggaaaaatacaggccaggcacagtggctcacgcctgtaatcccagcacttttggagaccaacgcaggcgatcagttgaacccaggagttgaagaccagcctgaacaacatagaaagatcccatctttacaaaaaatgagagaattagccagatgtagtagtgcacgcctgtactcccagctactcgggaggctgaggtgggagaattgcttgagcccaggaggtcaaggctgcagtgagctgtaatcatgccactacagtccagcctgggccacagagcgagaccctgtctccaaggcctaaaataacaataatatagttaatataaaaacatacaataatatagatcatggttgtacaacaatgtgaatgtacttaatgtcacagaactatacactcaaaaacagttaaaactatacatatatacacacatatttacatacatatgtatacaaacgtgtgtgtgtatataattttttttctgagacatggtcacactctgttactgaggctggagtgcaatggcgcgatcacaggtcactgcagcctcgacttcccagactgaatcgtcccacctctgcttccagctgatttttttttttttttttttttttttggagagacaagatcttgccacgttacccaggctggtctcaaactcctgggcccaagtgatccacccatctcggcctcccaaagtgctgggattacaggacatgagccactgtgcctggctgttatatatattttactacaatagaaatatatataacaggcacagtggctcacacctgtaatcccagcactttgggaggccgaggcgggtggatcactagagcttgggaggttgaggatgcagtgagctatgatcatgccactgtacaccagcctggggggcagagtgagaccctgtctcaaaaaaaaaaaaagaaaaaccatatacatacatacacacgcacacacaccacacacatacacacacatgttagtaaacggaagaaaagtaagcaagctgttcaaaatatatatgtatactacaatattaaattctcaccaagcccgtatcataggtcaggccctgttcccaccatcacattcattaacttatataaaatgaatggagctttatggagtgggcagtgtgttcatctccattgtagtccgtgttagacatgaggaaattgagcacagagaggtcaaaacacttgctcagagacacatagctggtggtggctgtacccacattttgcctggcagccaaggaggctttctggggacccactcttgaggcacctgcagccaggagcagattgggtggccttgtgctttctccccatcagttcctagagggaaatgcggtccctggaggtagagggaagagcctctcctgggctagttgaagcaagacctcctgcctcaggttggcttcccaaccacgggggcctctaagtggcttcattccttccggggccttctcctagcccattccacctgtcacactgggtttgtgtgacactgagcatcctagagggcacagtcacctgattgtgtttgtcaccaagaggggacctggtgacagactggaggctcataccccaaggctgggcacctgtggggctccttctttgggaggtttcagcaggagggcactgtcctttccccaaagccaagaagccttgctctgttgcccaggttggtcttgaattcctgggctcaagtgatcctctcacctcagcctcctgtgtcgctgggaccacaggcgtgcgccacctcgcgcggctgctttttgtttttcacgagctttgcagatgaacaccgcagtcactctggtggctctttttagaatgaggtcccgagagctttgctcaggtgcagcagctcacaaaaatgatccacagctgccaccctgtccatccagcgtgtcccagctgggatcaggactatcgcattgtctgccttgggctgaggctcattgtctcttcctccctccccaccaggaccaattctgactccgccctgcaccagagcacaatgacgcccacgcagccagaatcctttagcagtgggtcccaggacgtgcaccagaaaagaggtatggacaggggactcgggtgtctctgctggggtgaggcaagtccagcaggtaacccctgttctccaggaggtcacaagcttgtgggcagatggctcttcaaaggaagactcagaccatgctgagggatcgggggaggggatcggaaactttcagaggtggtgctacttaagttggattttgaagagtgcataggagttttctaggcagagaaaacaaccctgcaggcgcacgttggctcccattcctggattgagggcgtggccatgaagtctgggtgctgcacagatgctggtttcaaatgtagcggcagcaagcccacgcaaaggagcatttgtcagctcatgacagagcaggccaggggtcgacttctagccacaggttcagctccttccactgcttcccactggactgtttcctggctctgctgctgagaactctcctcgcctgcagcccctgggcccgtcctagctatagcgagtgagaaagaggccatctcttcccaactcttggccagagtgtcgcctccagctgagccatgcacacccctgtggcggggacagatctgtacccaggtccttggctccaatttgaagccgggcgtggaggcggcaccctgggaaccttcaaggagggcatatgctgtcttaaaaactggggcggtgccatcagagaagggagcttggaggcttgaggccagccccagggaacctggtgtggcccaaggcactgaagccagggagttgcacgtgcttagggctcacatacctatgcttgtattgctgccgttcaccgagtgggtggttaacacgcaagggagattctgctgataggaggaggaagaggaggaggaggaggactgttggccagaacctcactccggggttccggctcagcgtgcagcagagacgggagggagaagagaatgtctccataatgaaaatgaggcttctggaacacccaggggtgctgaggatagcacagtgcctggggcttccctgctattcctaatgagcaggctgttctgaggctgctgcctgtcctactaggtccccacagacagcacgtccgaggggtgggcaacaggatgtcaccatcccctggaacactgtaacctgggaaaggagctgtgacatgggacccctggtggccttggagtgggggcctggcagggacacatcatctatccccactctcctcggagcgcctgaggtggtgacagggctggggttggcctggctgcctcctcgcagcctggctttcaacaaggaaggggttggcctatctggctgtgctcatcgtgggtctcccagttacaagtaaaaaaaatgaaatgtgcaacaggcataaagaaaatggggaaatgggctgggtgtggtggctcacgcctgcaatcccagcactttgggaggccgaggtgggtggatcacaaggccaggagtttgagaccagcctgggcaacatagtgagactctgtctctaccaaaaatacaaaaaaattaactgggagtgtttgcacgtgcctgtggtaccagccactcgggaggctgaggcaggagggggaattgtttgagcctgggaggtggaagttgcagtgagccaagatcacgccactgcactccagcctgggtgacaaagtgaaaccctatctcaaaagaaaaaagaaaatggggaaatgtttactcttaccttgactgaaagatccaaggaaaggcactttcaggcccggctggttccagagcctcaattgatgcccatccatcccgtcgctcagactctccctctcctcttcttgctctggggctggctgacattgtggctgactcacggggccgctgctgccatgagtgcactggtcccacctccatcagcattgagtgacatgatctgaacccctgtgcttggtgccgggggctcaataaaggttcagccactgggtgtcagcagcccagagcaggaagcaagatcaagtggtggatgcggaacagaacatgcaagctagggccaggcgcggtgggtcatgcctggaatcccaacacttcgggagagaggctgaggtgggcagattgcttgagatcaagagtttgagaccagcctggccaacatggagaaaccccatctctactaaaaatataaaaattagctgggcttggtggcacatgcctataatctgaggctgaggcaggagaatctcttgaacccagtaggcgcaggttgcagtgagccaaggtgccactgcactccagcctgggtgggagagcaagactgtctcaaaaaaaaaaaaaaaaagaaagaaagaaaaatatacacacaagctaggcagctgctcttgggagagattcttggctgttctctgtagcctgacgcctctgaggcccacgttggttcagcctcttctgtgggaagcagaatccacacatcctcaggctccagagctgctgttttatattattttattttagagacagggtcttgctctgtcacacaggctggagcgccatggcatgatcacaactcgctgcagcctctacctctcaggctcaagcgagccctccacctcagcctctcgcatagctgggactacaggtgagcaccaccacacccggccaactttcttattttttgtagaggtgaggttttgccatgttgcccagggcagtctcaaactcctgagctcaagtaatctgcctgcctcggcctcccaaagtgctgtaattacaggtgtgagccactgtgtccagccttgtttctctttgtctctctttctttctttttttttttttgaaacagagtttcactctgtcgcccagactggagtgcaatggcgtgatgtcagctcactgcaacctctgcctccccggttcaagcaattctgcctcagcctcccaagtagctgggattacgagtcctgacccctatgcccggccaatttttgtatttttagtagagacaggatttcgccacgttggccaggctggtctcaaactcctaacctcgggcgatctgcccacctcagcctcccaaagtgctgggattacaggcgtgagccaccacgcccagcctattttttcttaagtcacagattctctgacttatttaaagctgataggcggggcacggtggcgcacacctgtaatcccagcactttgggaggccaaggcgggcggatcatgaggtcaggagatcgagaccatcctggctaacacagtgaaaccccgtctctactaaaaataaaaaaaataaaaaaaaaattagcctggcatcgtggcgggcacctgtagtcccagctacttgggaggctgaggcaggagaatggcgtgaacccgggaggtggagcttgcagtgagctgagattgtgccactgcactccagcctgggcgacagagcgagactccgtctctaaataaataaataaataaataaataaataaataaagttgttgttgtttgtcatgaagcccttttttgtggttttagtacagtccacagaagttcccgttaggacagttgcagtcttaccatggccatgactccgtgtgtcagggacgtgtcctcctggtaccaccatgcggctgcaaagaaatttcttctctgattctccttctccccctcccacctccccagtcttactgttaacagtcccaggaatggaagagaccacatcagaggcagacaaaaacctttccaagcaagcatgggacaccaagaaggtaagagcctatgagctttcaaaaactttttttcttctttctcttctcaagcatcacctgggcaaaggtgacaaaatggcaggttggggtggcttcaccttcccaagacagggaacctcactccgatttttccatcttcaaattcagagaatctgttaggtctgttgatcactaagatcactaacagcaggccttatccaacaggccggaactgcacaaaaattacaacccaggctgggtgcggtggctcacacctgtaatcccagtactttgggaggccgaggcaggcggattgccagaggtcaggagttcaagaccagcctggccaacatggtgaaaccctgtctctactaaaaatacaaaaaattagctgggtatggtagtgcacgcctgtaatcccagctacttgggagactgaggtgggagaatcgtttgaaacctggaggcagaggttgcactgagccgagattgtgccattgcactcccgcctgggcaacagagcaagactccatctcaaaaaaaaaaaaaaaaaagaattaaaacccgttgctggtcaagttgcactgaaagggacagcaatgcaaattactcctcccctatgggaaagtgaggcaccagcctgtgccaaaatcctttcaaaagggtttgctccaggctgtgcatggctcacgcctgtcatcccagcactttcggaggaggctgaggtgggaggattacttgagctcaggagtttgggagcagcctggtcaacaaagtgagaccctgcctctacaaaaaatgagccaggggtggtgatgtgtacctgtactctgagctactcaggagggtgaggcgggagtatcacttgagcccaggaggtcaagactgcagtgagctatgactataccattgcactccaccctggacaatagagcaagaccccttctggtggggaaaaaaaaatatttgctccaataatttcttcttcaggaattcaatcattgagagttgaggaatgaataaggaacaatgtgttttttaaaggtattttccagagcttttgcaataaactagaaacagcctgcacatttcaggagtaaggaatttgttgaggaaatagtcttcagtccctcgaggagataagattctgaagaaattttaaactcatgagagacactcctgatactattgtcatgtggacagagtaggataagaatattggaaaaggcataaaacttgcagagatgcagctgcacagataccagcaggcagacctgactgaggggcgtctcacaagggttgtgcgttttctgtcgtggtgagtgtgggtggtgctgtcagccctttatatccatctgtgtatttctttttcttttcttttatttttatttttaaattttattatatttattttaattatttttattttatttttttgagaaagagtctcactctgttgcccaggctggagtgcagtggtgtgatctcggctcactgcaacctctgcctcccgggttcaagcgaagtgattctcctgcctcagcctcccgagtagttggggtcacaggcgtgtgccaccacacctggctaatttttgtatttttggtagaaacagggtttcaccatgttggccaggctggtctcaaactcctgacctcaagtgatctgcccgccttggcctcccaaagtgctgggatgacaggctcttttttttagaaatagggtctctcttatgcctaggcaagagtgcagtggtgccaccctagctcactgcagccttggagtcctggacttaaacagtcctctgcctcagcttccagagtagctgggactacaggtgcatgccaccatgcctgacaaatttttgtattttttgtttttttgaggcaggatcttgctctgttgcccatgctggagtgcaatggtaggaacacggttcactgcagcctcaacctcccgggctcaggcgatcctcctgcctcagcctcctgtgatgctgggactataggagcgtgccaccaaacctggctttttttttttttttttttttttttctgagatggagtttcactctttcgcccaggctggagtgcagtggcgcaatctgggctcactgcaacctccgtcccccaggttcaagtgattcttctgcctcagcctcccgagtagctgggattacaggtgtgagctaccgtgcccggccaatttttaaatcatttatagagacaggagcttacttcgttgcccaggctggtctcgaactcctgggctcaagcagtcctctgcctcagcctcccaaagtgctgagattacaggcatgagccacctcgcctggcctattttttaatttttgttaaagacgggggtctcactatgttgcccaggttagtctcaaactcctgggctcggtctctgtgtttcagtttggcacaaagagtcactgagatttccactcttacgggaaaaaaactttaaaaaagaaccctaggccaggtgcagtggcttacgcctgtaatcccagcactttgggaggccgaggctggtggatcacctgaggtcaggggtttgacaccagcctcgacaacatggtaaaatcccgtttctactaaatacaaaaaattagccaggtgtggtggcacttgcctgtaatctcagctacttgggaggttgggacaggagaattgcttgaacccgggaggcagaggttgcagtgagctgagactgcgccactgcactccagcctgggcaccaagagcgaaaactccatctcaaaaaaaaaaaaaaaaaaaaactctaggctggacggacacagtggctcgtgcctgtaatctcaacactttgggaggctgaggtgggaggattgcttgagcccaagagtttgagaccagcgtgggcaacatactgagacctggtctctgcaaaacattttaaaacagttagctagtgtgatatgtgtgtgtgcctgctacttgggaggcaggaggatcacttgagcccaggagcccaggagttcaagtccagcctgggcaacagagcaagaccctgtctctaaaaaaaaaaaaattctaacaacaaacaaaacaagaaaacaaatgtccagcagcagagaggtgggtaagtaggccacggtccacccacacagctggatgttctgccgttactcaagaaaaggaagatggcgacagtcaccttgcagagggagacacaccccgatagtggagtggggtggtgggtgaatttttaatactgctcagaaatccattaatgtctccataatgttggtggaatgcttttcaaagtattcttgagaacgtgatcgccggtgtgctttgcagaaatccggtaatgaagcgaatgtttactctcagaatgaaggaggctctggccaagcagaaacccattcagccggcgttctccacagaggcttaacacccgccggtcgcacgccacccctcgggcaccccagtggctgcgggttgggcattgccccctcacggtgtgtgcattttgaggccagccccaccctctgccagcatgttcgcctttttcatctgataatcctgaaagaactcagccagaagtgtttgccccagggccccaggggcggaaacgtgtcacactgggaggcctcatccatggctggggttctgtctggtcatgcctgccaagagcagaagacggtcctgcctttgtccttgaacaggagtctcgggggcccctacctggagcctgtagttccccagggcctgcagtgatcccatgtcttggctggtgttagtgcccccaactcacaggggaggaaacattggtcctccaggaaggttttcctgggcaccccctccccagggccaactcaccggcctctgtctgtgagcggtgggggcttggaggctgccctgctaccctacggtgtcctcacagccagagccagaccccaccctgcctcagaagcccttggaggtacccggcaggtctttctgctgggattatgattttctttcccattgctgtgaaagtccatacttcagtccgggtgccatggctcacgcctgtaatcccaacactttgggaggctgaggcaggaggatcactggagcctaggagtttgaggccagcctggacaacacggtgagcctcatctcttaaaaaaaaattaaaaaataaaaattaggctgggtgcagtggctcacgcctgtaatcccagcactttgggaggctgaggtggacagatcatgaggtcaggagatcgagaccatcctggctaacatggtgaaaccccgtctctactaaaaatacaaaaaaaattagccgggcgtggtggcgggtgcctgtagtcccagctactcgggaggctgaggcaggagaaaggcgtgaacctgggaggtggagcttgcagtgagccgagatcgtgccactgcactccagcctgggcgacagagccagactctgtctcaaaaaattaaataaaaataaaaaattaaaactaaaattaaacatttttttaaaaggcggaagaggccaggcaccgtggctcatgcctgtaatcccagcactttgggggccgaggtgggcggatcatgaggtcaggagatggagaccctcctggctaacacggtgaaaccccgtctctactaaaaatacaaaaattagccgggcttggtggcgggcacctgtagtcccagctacgcgagacactgaggcaggagaatggggtgaacccgggaggcggagcttgcagtgagctgagatcgtgccactgcactccagcctgagagacagagtgagactccgtctctaaaaaaaaaaaaaaagaaagaaaaaaaaggcagaggagcccttcccgagaccctgaacttcaaaggctctgtgggccacagtccaagaggagcctattgtgggccctttccatacaccatgtccatgtcccgaaagtgtcctgacagtgctcctcagccaagcagaaaaaccagtgtcatgctgagggctacccaagccctagtcagtgggggatgagtgtggctgcccacatagcagagggacgtctcgggactctcaggaagtagcagaccctgagggtccccggggaagtcacatgtctaggtctctgctgcaaagctggtcagccccaagacaggggcagtgacctctgaactgagtttagggcatcaggtccaagcttcctgggtctcccctgactcagttcttccctcctttgggccttgggcttgattcactccctggagactggtggctgctcacaaacttgcctggtgggcactggacagaggcaactcctgcccccggaacccctgccaccatgatctgggaacagcatggatggttggggacagctctagggacacttagcctcgggtaccagggcttagggcggccagcttagcagaggcccctctactgtgctggctgctgactgctgtggtacagcgttgggagtgtcaagaggcgctttacacaaaatttaaaaagcagccgggcgcagtgcagtgacgcgtgcctatggtcccagccactcgggaggctgaggcgggaagatcatgagctcaggaggttgaggctgcggcgagctgtgatcacaccactgcactctagcctgggtgacaaagtgagatcctgtctctatgaaatagaataaaaatttaaaaagatccacatgccatgttctccccagactcctctgaaaagagactgcccactgagggcaggagcagggggaggggacccatagggagaccctctctgtgcaactcttggcttcgcgctgggcatgtctggggcccgcccctccaccctggggcggtgcccctgtcctccatctgtggggctctgcggccccagcaagcttggttctcatgatgcatctctgggctttgtgggaagatcagccgtttcaaggaggcccagtgcccaggaggagggccccacagggtgtgccccagggctcaggctctcctgtcttctctttcagacggggtccaggcccaagtcctgtgaggtccccggaatcaagtaagtctccacagggcccaccccgcacactgcatctgctgcgctgctccgtccaccctggggcattctgtccactctcttgaggttgcaagtccctgcaagagggacactgtgtgaccagaggccagtgacagagcccccacatgcccacccctcaggcacctcattcccagggatgatgccctctcctgggttcagggaggttgctgcccccaggccccccaccgtcctcaccgggtgataggctgctttccaaggtctcagcctggtgccagccaacagtggtttcccaagcacacggcacctgatggggggtggccttttgcacccgctgattttctcccgccagccccctgtccccgccgccagccccgccccatgagctcacctcctgcctgcctctggccttttcccagcatcttcccgtctgccgaccaggaaaacactacagccctgatccccgccacccacaacacaggggggtccctgcccgacctgaccaacatccacttcccctccccgctcccgaccccgctggaccccgaggagcccaccttccctgcactgagcagctccagcagcaccggcaacctcgcggccaacctgacgcacctgggcatcggtggcgccggccagggtaaggcagggacactccgccctcggacagagcactggcttgtggagacaacacgggcatctgcaggatgacttggcagagtcccgttccaaatactagggcatgggggacagggctggggggcggccgacaggctgacccagcgggcacaggcatcccaggtaggggtggggcctgggtacaggcctggtggaaaggagtgcctggtgcccccagacaccagacagtgggtttgagggtgtgtgatggtgctttggggagtccaggagggaagccctgggagttttaacgcagctggggtgggccaggccttccctccgcccctcctcgaccccagcccctcattggggggcgggaccaggcctgacctgcttcctccacccgacatctgacagtgaccacctacttgtcacatcccagcaccaccacccccacccgtctccagctccacactcctttcttcctcagccacatccacagggacgtcgcacaggcccctcgcccgtcccaatagctcctggcgctgctgccgccctgctcccccgggacccccctcctgtggctgcactgattgcagaggtgtcccccaactcctctgtcctttcccagacatggacctgacccattgtcagcgtgtcctgtcggttccgccctcaggacctggcctgacctggctcctctccccaggcccccagccccctccccacctagaacagccaccagccatggcttcctccacttgggacctcgcacggcccccagctccctctcagtgaaagcctgaggcctccagggtctgggatgtccaccctggcccaccctccaccctctgaacttagccccagtcccacctcagggcctctgcacatgtagtccttcctctccaggaggctgcaggcctccctccctcccctgccctgccctgccctggtcagagctagtccccttggcaaggccgtcccggccctggcctctactgccgcgttgctttcctgcacccctgccctggcccacgttgctgctccgtccttagctgttgcctgcgtccccattggctgtgcagtgtgtgacctgcatcccgggggtggcaggcacctggcttccaaggaggagaaatggcgtggccccaactagtcctggggggtgggacaggctggaggggctgtgggggatgcactgggggtgggggtgacagacgccaccttgctgtgctctgtcttgccccagagctggagaatgaaccggccccggcccactccaccagcccatcctgcctctgccccaggcttggaaggcagcaccaggcagggctttctatgagatagtcacatgcttacatttgtaactggcggagtccccctggctgccctggaagaaggagcttttgggaggggcggccactggagcaggacagcaccccaattgggggctctgcctggagactccagggtgaaattggccagcctgggagctgggttgatgcagggagtgaaggagagggaggagcctggaggcgttcctggctttggtgccagcagggccaggggcaggcaaggggcgtggagggtggcgtgaatgttcctgggttttttggaggagggcatggggactagaatagtgaagagggaacagggccccagcccgagcgcattgaggctgcattctgactcccacacctgggccctgggccctgggcccgcggggctctgccactggacagagggcaccagagaaggcccagaaaacacagccgattcggaggagccctcttcattgtctccagatagacagggccaggcaggcggcatccacacgcacctgcgcagaaccagaaagctgaaggtcagcgctggggctgcaggtacccctgccccgcatagaagccaccatctcccagcccctgcttttcccctcacatctcttcacggccaccagagcacatggcccccttcccgctggagggtccttggcaggtccccagcgcccgcccgggagctgcgcacctccagcaggcacccagtctaaacaagcacaaggaaacacacaacatacgtggaagctggagccggcgctggccagagcggcccggtaatgcctgacatgtgttgggttgtttgtgaacctgccgcccaagcagctcgcctggcaggggctttgctttctggacgccttttaaatcaagccgagctgccggcccctggcacacacgaaggtggccccctccctcctcgcaagcccacccgccagtcagaacgtgagctccctcaggaaggaagacagaggccttcgcggccgaggagacagtaccccgcttggctccatctacatttcccatatccctggctgctttccagagtgcaggaggagggcaggccctggctcctccttcctggcccagctttgaggccgggcgggccctgacacctggcccgccctcccctggcagctctccctgcccgctccagacttcccctccagctggctctgtgcctgttcccaaaggtgagccaggttgccaaaaggaattcaacagcaaggctcccgtccgccctcctgggccaactggcctctccaggggtggccgagagctcactttgcagccagtggaagattaaaaactcccttgtattcagggcagacattagagactggcagcccaagggccaaatccagcccatggtatgtttcgtgtgggcccacagttgtgcatctgtaatacagccacacgccacatcttgacgtttctgacaacagcaaaccacataatcggcagtggccccatcagagtataatgctgtgtcttactgctccttttctaggcttagacacacaagtccttaccattgtgctacagttgcctactgtttttaattttttttttcttttttttgagacaaagtctcactctgtcacccaggctggagtgcagtggtgtgatctcggctcactgcaaccttcgcctcccagtcccaagcgattctcctacgtcaacctcccgagtagctgggagtacaggcgcccaccaccacgcctggctaatttttgtatttttagtagatacggggtttcaccacattggccaggccaatctcaaactcctgccctcaggtgatccgcctgcctcagcctcccaaagtgctgggattacaggcgtgagccactgtgcctggccgacggtattcaggacggtcaccctgtacaggtttgtagcctgggaacaagggccctaccgtctggccgaggtgtgcagaggctctgccatccaggtttgtgtaagttgccctgtgatcctcatgcacagccatgaaatcgccggacaacgcgttttttcagaagtcacccccattgttaagtgatgcttgactgtacttagaatcaacattgaaaaaccaggggaatgcccgtagaacaccagatttctggctgctcttgaagaatcagacagcccagtggccatggccgatgtcttgcacctcgagacgggccacagtgctctggtttgcctcaggccccacccgcccctgtcgtcccacatccataccctcacacgctcctgacgtttgcccctactttgtaccgagcccgacctctgcttctgacctgggcactgagcatctctcggcctgctggacgcacgaagtggcggacactcaggagaagatgagggagtggcccagggtcgtgactctgagtgtgctctgagcaggcttcccccacatcctcccgtccaggcctctgttgatgcctccctggacgccagggcctgcaaagggcgcttgctgcctggggagcagtcaacagcaccaggcttcctcccacagtgcgcagccaagcagagctgccagggcatccgaggggaagtgcaggcgtgaccgagctcgccccggtgagcagctgccctgggcacggacaaggctgtcatctcccctcggcgcttgtcgggtgtgttcccatgggcccacgcacccgccgtctcatctgccggaacaaggttaatctggtgcccagatctcctggggtgagtcaggcggcttcacccccgccttgactgcaggccagatgctcttcagagactgctcctgacctcaccagggcctcactttgaaccggagagggcggctgttatcgtcgccatctcaccaaccagggaaccaagtctccagagtggatgggggtcaggccaggctcgcaggggtcctcctgccatcgaggggcctgttgcctgcctggcatggtgcccacaataacccagccagccccagctactgccatgttgaacttgacctcacccagcttcatcactgcagcagaatccaaggattgggttgctcagtgcaagggccttcggggccggggtgagggaaggggtgatgaggcggctcctggcaggacctccagcaggaatgatgtgtcagaccccagggcagagagggggaaggatgttaaggagtgacattctttagttcagacagcctgatgggtggcactgcagcttggggaatgcaccaggtctggggaggaggaagtggctgtgggacataggggatagcaggtgctcaggtctgggggccaagagaagcagctgcaggaatgggcacattcactgaaggagggcaagatccacgaggtggtgggcaaaaccacagcattgggcagggcctgctggcttgaagctaaccacaacccaagccattttcagccaaaaaaaaccatttattgtctcctgaaagtgggaagcaggctcagatgctgcctctcccctgcagcccttcagctggctcctcacctcgccacaggatgccccacacacggcttcagacagcccttcctggaattccatccaaagcccctgggaaggctctcattgggccagcctggttacatgcccatctgggggccaatcttatgctccagagatggggatgtgctggttggctggctgtgagacacccccttcctggaaggaaggagaacagactctgcaggactgtgggaccctcgggtcaggaatcagggccttcggggggtgcccaggtttggcagttgggacatgtccatgggcttctgtctgagcagttgagctattcccatgcagtgtgactgtgggtgtgtaagcagccctttctcagtgatcagtctcacacctgctctccctccctcctacttcctctctaggaatgagcacacctggctcctctccacagcaccgcccagctggcgtcagccccctgtccctgagcacagaggcaaggcgtcagcaggcatcgcccaccctgtccccgctgtcacccatcactcaggtgcgagggcaaggtggggggcaggtgggagggggaaagggaaaggtggaggcctggctctacctcttagaaggcctcctgttccttccaggaggccacaaaaccttgagaatgctcccaacacttttagtttttattatcaaattttcaagccgggtgccgtagctcatgcctgtaatcccagcactttgggaggctgaggcgggtggatcagttgaggtcaggagttcgagaccagcctggccaacatggtgaaacctcgtctctacaaaaaatacaaaaattagctgggcatggtggtgtgcgcctgtggtcccagctactagggaggctaagatgagaggatcacttgagcccagggggtggaggctgcagtgagccatgatcacaccactgcactctaccctgggagacagagtgagactctgtttcaaaaaaaaagaaaaaactcaagaggttagcttttgatttttcaatttgctgtatttgcttgtctacttttttgggtagtttgtatgtgtctaggaatttgtccatttcgtctttgctatccaacttgatggcagaaaatttttcataatactcttttgtaatcctttttttttttttttaagacgaagttttgctctgtagcccaggctggagtgcagtggcatgatctcggctcacggcaaccttgcttcctgggttcaagccattcacctgcctcagccttccaagtagctgggactacaggcatgtgctaccatgcctggctaattttttttttttttttttttttggtatttttagtagagatggggtttcaccatgctggccaggctggtctcgaactcctgacttcaagtgatctgcctcctttggcctccaaaagtgctgggattacagatgtgagccaccgcgcctgaccgtaatcccttttttaaaaaaatttttgagacagagtctcgctctgtcacccagggtggagtgcagtggcgtgatcttggttcattgcaactctgcctcccaatttcaagcaattcttgtgcctcagccacctgagtagctgggattacaggtgaccgccaccacgcctggctaattaaaaaaaataataatagagatggggttttgccatgttggccaggctggtctcgaactcctggcctcaggcaatctgcccacctcggcctcccaaagtgctgggactataggcgtgagccaccacacccagccttgtaatcctttttatttacgtaaagttggtagcaaagttcccattttcattttctgattttagtaatttgaatcttccctcttttttacctaatcaatgcagcttcatagaatgagttaggaatgttcacttctcttctattttttggaagtatttttaattcctctttaaaagtttggtaaaattaggcgggtgtaatggtaaattcctgtagtcccaggtttggtaaaattcaccagtgcagccacctgtgtcttagctcaaatgtgttgggaagtttccaatctcatctccttcttataaggctattcaggttttctgttttttcttgagtcagttttggtcatttgtgcatttctagaaatttatccattttgtctttttaaaaacaaaacaaaaaaaccctaacagagaactttgacatttttaaaatttttttattttttaattttaatttaattttttttttgagacagagtctcactctgtcgcccaggctggagtgcagtggcgtgctcttggctctcctgcagcctctgcctcccaggttcaagcgattttcgtgctagcctcccaagtagctgggattacaggcatgtgcctaccatgcccagctgagttttgtatttttagtagagacagagtttcgtcttgttgaccaggctggtctcaaactcccaacctcaagtgatcaccctgtctcagctttccgaagtgctgggattgcaggtgtgagccaccgcgcccgtcacttgtttgtttttaatgtaaccacagtggcattgtccacctacaacgaagttaatggtagttccttggtacctggcaatgcccggcccggactccatttctccccgcccctcggcccccatgtctcctgtctgcttacaaaggtgtcttattcagatcaagatccagacagagctgtgggcgctggctcctggcagctgtgtcttcagccactttgtgagctaggctgtcttaatctgacacctgccccttccctctatctggaaactcctttctcttcacaaatgacccactggtcctcagaggccgggcatcctgctaagtggtttttgttccatagctcctgggcacgctcagcctttcttagagggcagggaccccacctttcccaaggactgtcagcttggtagcccctggctgtgagtttccacacagacagtgaacgtcacacacttccctcttattgattttcctctttccagctctgcgaaggcctgagccagcccttggtgaggggccatgctggtatctccagcaaccccagcctctccagcatccccagagtgggcaaggctttgggcgggggggtttgggaaggcaaggccagtggatcacttgaggtttccccgcagcacccacaggggctgggagctggctgctcactgagccaccagggatggccatcctgggcttgccctgcagctggtggactggcctgagctgcacggcatgtagtgcgggtgcaggcacaacaagctggaggaggtcaggtcctgcccagctccagctgacccccttggggccctgcgtgaggcccaccctctctagcctgggctccctcatcgtgaggagcacccagcccaggggctgcctgtgatcacagggcccttccacctcgcctgctgagcatgccaggctatgggggcccgagggggccaggcgctgacaaccagggcccgccctgcctgacgctctcctctcctgcaggctgtagccatggacgccctgtctctggagcagcagctgccctacgccttcttcacccaggcgggctcccagcagccaccgccgcagccccagcccccgccgcctcctccacccgcgtcccagcagccaccacccccgccacccccacaggcgcccgtccgcctgccccctggtggccccctgttgcccagcgccagcctgactcgtgggccacagccgcccccgcttgcagtcacggtaccgtcctctctcccccagtcccccccagagaaccctggccagccatcgatggggatcgacatcgcctcggtaagcccagggtggggtccctcggggcctgactgggggtcttgtagaggacagcccgggggctgcagaacagtcgggttacctgctgcatgggccaggggtcagaaccccagcgaacgctgcctgggcccacctctccacggggctaccccttggaatcaaactgagactgtcactccctgtagagatggagaaactgaggcacgagcaggtggctggccccagattccacccaaggtgggccaccccatgtttaactgccgagcaccccttcttggcctctctggcccctcccacctgaagccaggcttcctaggaggcaagaagagtacggcgttctcagggccagggcgcaggccgggggccggggatgacgtgagcttatcagagaaggaaagacgaggccagtccaagaggcggcagcccgttgggcacagcgcctggggcccagggctgggggctgcagctcagaccattggacttttctgcctagggccggctcaggcagacaaaggctgggctttaaccctgtacccacaaaccttcctgactgtccagaccacctgcttgctccagcggcgcgggctgggtggcaaacagctgcattgggccacatccagggaaacagggacttgtgttccgggcacaatgagtcctcccacttgaccccgactgccagccccaggctaaatgtcctccaaacattgtgtgctctgcaaagaacagccgcctgagctgggtggggcaggcaggtgagcctgtgggtagacacccatgttcccaagctgctctgacctcacggaggggaccacccacggcccctgggtggaagagtgcccaagtcctttctttggtggaaacacagcaggtcctgggggaggctcccaaggtggggcctcgccttggagctgggtggttcttggagtcacagggtgtctgggccaggtgcagggacggcccttctagggctcttgggtcaggctgtccatgtccagcaccctcacacaacaaagacggcttcctgcccccacttcaaggacttctagcctcctggggttgaggggggactcttgagtttttgcacagactcacccaaatgagaatctccctctgatccctttgtcctttccaactccaggaaggcccaagtcagccatccctaagtaacagtgctggcacctccatcacccacgcaggcgagctcaccgccaccccccgccctaccccaccccgccccacctggactcaagccctaccccaaactgcccagaaggcgccaccaaggacatgggggagacagcaattataggccctggaccggtcaggctgggcctcattcagtgactggctcagacaggtcaggcaagttgtctgcaggcacacagcatggctgggccgtgctaggacaagagagtggtctgaatccggggcctggcctggcccgacctgcctctgaaagttctgggtcatagcagtgagatgcccgggcctttcgtccctcgagcaggtggaggaagtgactgccccttgcaggtctcagatggcataacccaggcaggtttgtcctgcagcagggcagggatagtgactgcgccatgctgggagcctgggctaccagcaagatggccttcactcagtccccacccccagaggtgggccagacctgctgggctgcagacttaggggcttagagagccaggggacctgcccagggcacacagtcagcgagagccgggaacaggaggcagccttgggttttccctgcccatggcggtgtgtgtgtgtgggttgtgggtgtgcacaagtgggtgggtgcgggtgtatgtggtgtgcacctgcatgggtgtgcatgcatgtgaatgtgtgtgcatgtgtgcatgcgtgggtatgtacatttgtggatgtgtggacatttgtggatatgtggacatttgtgtgtggatatgtgtgcttgtgtgggtgtgtgcacacggtgtgtacattttggtgtgtgaatatatgtgtgtgtgggtgtgtacatgcgtgggtgtgtccatgtgggtgtgggtgtgcatgtgggtgtgggtgtgcatgcgtgggtgtgtacatttgtgtgcatgtgtgcatttgtgggtatgtacgtttgtgtgtggatgtgtgcctgtgtgtgtgcatttgtgggtgtgagtatgcgtgtgtgtgcatgtgtgggtgtgcatgcatgggcatgtacattcatgtgtggatatgtgcacatgtgtgggtgtgcatgtgtgggtatgtatattctagtgtggatatgtgtacacgtgggtatgtctgtgtgggtgtgcatgcatgagagtgcacacgttgctatatggctctgagcctgctgagtcagggccaaccctctgatcaccctcctgtagctccaagaaggagggcagttattcaccctccacgccgttccttcctgggttcgggggcagctccccggaggctcaggtacccacctttcctgcaggtgtccaggctcctctgcctaccagtggggtggcgaccatcaccaaggtgtgaggggcggggggacctgcctgggggctgatcaggctgctcccgggaagcagggactggagcccgggcttgggcagctgggctgcggcgtgctgatctgtctgtcatcgcaggcgccggctctgcagcagtaccgcactagcgccggctccccggccaaccagtctcccacctcgccagtctccaatcaaggcttctccccagggagctccccgcaagtaaggggcgccgcctcccccttggcctgtgggctccacgcttgtcttgttcatgccccgtgtgttccctgcccactgtctgtcctcatgcatcgctcctcatgcatgtcctcatgcatcccatcccgtccacgccatcggacctgagctgtgcacctaccaggctgcaccagggcaggaaccccacagggtccttcccaggagccgccagagcctgcctctgctgaacactaggtgggggtgtgcgttagtgacattagcgatggctgtggccctgcctggatgtcctcattgagtggcccagggacaatgccctccacacccagtgtgtcacccagagcatgagctggagctttagggacccccccgacttgggggtgcagctgaggtggctggcccgcccgcagggaaggcgctgactctgcagccctgctttccccttcaccccataggcagctgtgtttctccagaaccactggcccaggaggcttctctgagccgctctgcagtgtctcagggcccttgtccccattccacagacgggagactgaggtcagcctcaaacctcacccatcagccctgggttttcctgttgcacccagcaccgtaggaccctggcttgctcacgccccagccactccaaggttcaggttcctcggaatgccccttcgttctgcctggccagtggaagcggccagcctggctccccactcagcctcctcctgttgtactttgacatcaggtgtggccagtagaccccacattccatctagaacatttgtccgggagaaggggtgcccacaaggccaacatccagccgccaactttttttaccctggcagcagagcctccccagaaccccgctatcctgggaccatctcatccctgaaatttcaccaagctgagaaacccctagcagccactgctgtgcccggggccctgaagccatccctgtcccctgtagaggggatgctctcgtcctacttcccagctagataaaagagtcgctcctccagggctgaggtcgggctcccttgtcccagggcaaaccgtgagcgccacagacaaggacagtgaagcccctctgcccccatctccagctctcacacgtgtatagggacatctgccccatcagccaagggccgtctgggaccactgcctgtagccccgtgttctggaggcaagttggtgggcagcagtggtctcggggaggcatgggggtcagcctggtgtctgcgcatgcttggtctgcccgcactggctctctgagctctcgggctctggcagcgtgtctggtctcgtcgtgtggtactgttggggatggggctggaggggctggagaagcggcaggtgaggcctgtcccaggtgggcagcccaggtggggctggttcctgagtgaggtccctcttgcatgtgagacaggacgggacaggaattaggagtcgagccagtttctctcaggagagagtcactggaatggttggtgaatttttgggccccaagccaaagcgggttagtctgctgggcagcgagcaggtggcggtgttgtcaagcccatgtctgtgtgtctggtgtccgtcgtgcgctgatgcaggaggcaggcggctcatggaggtatagggacatcagtacggggctctcaggggcagatggttctaggtggagccgagacctgccttccctctgcactgggtctccgaggactcacccatcggtcccacaggcccagaccaccccacacctgctgtgtcctgccttgagtagccactgtgtgcaccctagccaggccctgggccacaggcagctaccatttggtccagtttgtggctctctcccaacttcaagctcacctttctggcaagccctcatggcaggctcacagggaaacctcagcctgtgttcccctgtgtatgccaggcctttttgagcccaagccctcagggacaggatcaggcgctgtcctggaagcctggtcccaccccacaccccgagccccaggacagacccagcttcagaccagctctacgacagccaggacattacctattgcctgcctgcctccctcgcctcgggcaaaccaagccgcaagcttgcggtccttgtttccaaaacctgaagccgttgatttttagggccaagatagcatttttgccacacgtgctggccttcccttccttgggtcacctttttacctcttctctggcgtttgagtgggacgtccaacctcacaagcctcctcgccccagggtgagcgtgtctgtctctgttgtctgcccactgaccaccaggagcaactggtgggtttgtggccggcccctctctgggattgaggccagagactcaggcgttgggatcttcctggaacaaaggggatctctctagaacaaagctcagatggggagctccaagggagagggccagggctttgggtctgtggagacattcacctggacgccttatagggcacatgccttacgctatagctctgagaatggctgtggggcagtggcttcctggggacactagccagagctcccagccccctggatgctgccaggcctccagcagccacaaggtcacactgcagctggggttcccgaggcctcgtccacggccaccccctcctcgcctccacaccccagccagacctcatcccaccatctcttggggaggggctccgagtgtctcctttctagcgtctccaccacccataaggtcccctagccccctgctcctgtcaagggacagcccctgtcaccctgcctctgagagccctgctggcctcagatagcaggagtagggccccgggtcctgcaggctggcagccctgggcaggggctctccctgtgcctgtcctgtgctctctcagctggtggctggctctgtgcgcccatcctgtccatgtacgtggcctgcgtcgtgtcctttgtctcctgtcaggagtcaccaagtgcactttctgtcctgaatgtaacgtctgggcacttcccgccttggccctggtgacaggttctcctctggggcctgttgggtgggggttcctcatccctgtggcccccaacttccctgtgatggagatagaggctgccttacccaggcttgaggagaggagatggggatggggccttgggaaggggctttcgggttgcagaggcctcccaggagcaggtggcagaaaaaaagtcatccaggattggggggcacttctggaaccccaaaataagcatcatcatcagcctcctgccgtctgggaggttccaggggcctcttgtcttccagccgggcttgggaggtgccgacttcccacctggcctcaggccgtgaccacagcaggcctctcttctgtctgcagcacacttccaccctgggcagcgtgtttggggacgcgtactatgagcagcagatggcggccaggcaggccaatgctctgtcccaccaggtgagcgggcgcccaggctgccagccggccggtgcccaggacagatgcttgctgggaccctcgctgggacccgggccttgcgagtcagagctgcacgtgctcggggggcccgtgcctgcccctcagctttgcccctcggcccccgccccgtcccatctgcgggctatggaggctgagtccccggcaggggtggcctagcgctgcctcccctggcatctttgcccacctacagagcggaggccgagggcagagggtgagggggggcaggcagcaaacgccgggccagacagggatgggaccgtggctgtggacgcggcgcctcggcatggaccgtgcacgcgggtttgccgggaggtcgtgctggctttgcgtggaggccaggatcgggggcatccagggggcttggtggcagcctggagctgctcactcatttgctcatccattcatccattcatccagccagtctctagggtggcggggaggccccaggtggcgggtggagtggggttcgtgcttggcagcctgggtgccgagcatcctgcagggacagagtccccagctgcgggcaggacagccacagcagccaagggcttggggtggccagctgggcaggcccgcggtggccctcacagcctggtgtgcctcccttcccagctggagcagttcaacatgatggagaacgccatcagctccagcagcctgtacagcccgggctccacactcaactactcgcaggcggccatgatgggcctcacgggcagccacgggagcctgccggactcgcagcaactgggatacgccagccacagtggcatccccaacatcatcctcacaggtgaggccaggccgggggcgcgtgtgcggcgccccaaggggcctcagcccgtgcggagacagccagagactgctgtcccgcagcaggagggttgacagggccggggttgtgacccaagcttgatgggggcctgaggaggccacaccccctctcccctgaatttgactcactcctgggcttcgggccaggccaggccagggagatgcctctggaccagacgtcccgtgcataggatagagacggtcactctcccctctcggcggcctcctgtctggccaagcagcccgggtaaaggtgaagcagccgggtacacggtgcccactgcccaggccactgacctgtcagctgaatgtgcaccagggtcagggacggctgtggggtgggccctgtctggtgagcccagcctgggcagccagctaacaggtcagggccgtgatgcaccgtgacaaccacgcccaagcagtctgagcacggcgcctgggctcctggggacaagccagccccgtcctgcatggcacatatcaggaagacccggctccatctagcacagaacccagaccctgtctccctgctgaagaagatgattcccttatgagtcagggctgctggattgagggtgatgcgccccctggcagtcctcactggcctcttccaggctggaagtgtccgtatttagtgctcccccactgtggcctgggctctgagtgcagaatccagcacctccttcccacccctcgggtgtaggcagcagttgacgagaaattcaagggtggacgcgccagcctcagactcaggagaagaatcagaatctgacccccgcaatggcctcaagagcccagaaagacagggcgtttcagccccatttctcagacctggaacctgagtgtaggtggaagcctaggtttgaacccgggtctttgtgggggaactgaggattccctccagccctagcagcagctgggtccccacagtcactccagcctgcttctcagtgactcgtgccgagcagccctcatggctgagggagccggggaggtccctgccctcgccaggtcatgctgacgtgcatcagtgacacagcccttggcccgaggcttctccttggtgctcctgacatctggagctgacatctagggccagactggtctctggggtccaggcactgtagggtgctgagcagcatctcatgtgctggcccctcccccagtcatgacagctggaatgtccccagacattgccagcatacccaggggacagagtcgcccggcgggcatgcctggtccgacacatggatgcgagcgatggagccagggctaagcagtgccttttgtccccaccccatcccccagtgacaggagagtccccccccagcctctctaaagaactgaccagctctctggccggggtcggcgacgtcagcttcgactccgacagccagtttcccctggacgaactcaagatcgaccccctgaccctcgacggactgcacatgctcaacgaccccgacatggttctggccgacccagccaccgaggacaccttccggatggaccgcctgtgagcgggcacgccggcaccctgccgctcagccgtcccgacggcgcctccccagcccggggacggccgtgctccgtccctcgccaacggccgagcttgtgattctgagcttgcaatgccgccaagcgccccccgccagcccgcccccggttgtccacctcccgcgaagcccaatcgcgaggccgcgagccgggccgtccacccacccgcccgcccagggctgggctgggatcggaggccgtgagcctcccgcccctgcagaccctccctgcactggctccctcgcccccagccccggggcctgagccgtcccctgtaagatgcgggaagtgtcagctcccggcgtggcgggcaggctcaggggaggggcgcgcatggtccgccagggctgtgggccgtggcgcattttccgactgtttgtccagctctcactgccttccttggttcccggtcccccagcccatccgccatccccagcccgtggtcaggtagagagtgagccccacgccgccccagggaggaggcgccagagcgcggggcagacgcaaagtgaaataaacactattttgacggctgtcttttatatttctgagcacacacagagccctggcgtccaccggggcaggcgcaaagtggacagagcatgcagggcggcggacccccccacgaccctcctcgccctgtctccatcccctcgaagccctgcctcaccgcaggcaggcccatcggtggccacctttgccgggaagtgaccggaaggccccgtgaggggtcgaacgcggaggcaggggttacctcttggggctttacaatccgtggcccctcctgtcctgcactgtggtcaccggtcctgtcatagatgctgttaatttaaggtacaggcagaggtggccaggggagtttcattgtggtttttttttccttttagtttctagttacattttggttgtagatgactcgcttaatcttttaagccaacacttgcctgagagcatgtttttatttcagaaatccaactttacctattttttaagctaactggaaatggaggccatgcgccccaaagcagcccgccacccacctgagtgtaagaagtgagtccggcttttgggtttcaccccaagttatctcaaaacaaaagggctggtcaggctgggcagggccttgtcaggagctcacggtaggcagaggtgcctctgccagggccacagaacagacttccgggaaggggccttggcttttattgagggtctctcaaagacccagcctgccagcctctcccagaggtgcctgctagtccttagagtgtgtgtgtgaagatgccatgaccagtggcagctgagacctctctgccccaagagtgtgggggactggcagggagcgagggtccccgagacgaggaccacggtcctccctgagaacctgggtggaactggcatttcatcccctctccaccctaccctctggctcctagcccacaccccctctcttgggcagcgtggtctgctggctgccccttcttggcagctcagggtcgtggcaggtggacttggagacacacagcagtgtgtgttttagtggcaggtttcaggagcacctctaagaccagggtgacagggtacttgggagctgtcctggaccctccccataccacgggccctgcaagggaggcatcagggctggctttgttttctgctgttcttggaataggaactgctgttctgatccccccaaaactgcattgcggctctcgctcgctcctgcctgccgggacagcgccttctgctgagtccgtttatttgtagtgtcatggctgctgctttcactggggtcctgggcaccctggcttctgtcctcagagctgggtttgatcctagcaaccatcccttcctctctttgcccggcaatgcctttggcatgtgtctgagcagccaagtggccactcataggagaaggctccctggtcacgttgctcctgctgccgtcttgttccaaggtgcgggggggacactgttggtctgtccaggtcaaggtccctttctcttaccatgacagaggctgggggcagacagcggggacttttttttttttttaagaaaaactacatgtacataggagagtttcattaccattagacttgtatgtaggacttaaaaaaaaatggccttaataaaattacaagcaacccgcctggatgcggttttcaaaagaaggcattgaggaccatgctaggaaacctcataccccatccgtccaacctccggcgggcgccactgcttgtcctctggtcttcggtgtggacagataggagaggagggatgcccacctcggagcatcccaggcccgtggcccattttcagcatcctgaagccagattcacagtgacattgtgttaacgtgacgaccttggtccattatggagttctttttccaataagaacctggtggaccgaggtccgagcttgccagggacagtggggcccacgcgagtacccggggcccagccaggagccagcagccaggcgtccctgtgttccagaaggattcacgcccctcctggacctgggcgggcctcccagggggtctgtatcacggccttttgtgtgtgcgtacgtgtggtttttttaaatatcactactacatattcttgaattgccaagactttctgaaacaagacagcttaagggaatcagccttttgctttgtgatgtgaaaatactgtgatttgacgagccgcttcctgaggggcaggcccacgtggggaggttgcgccgtgtacatagacccgccgtctgtgtccttggtcaggcccggatgcttggtctacactgggttagaggctgctctccccacgcacccatgtgctcatggcttctgcagaccctctgctgggtacatcggtcccctacggcgaagttcagccagggctctccctcctgagagcatggcgtccccaccttcctgtttcgccgacgtcactacccagggtggcaagtcttgcaggcagagggtgtagcccaagttcagcctctctctgtgtcctccagagaagagggttctttgccctcatcagggccctgcttgtgggttttcggctctggggaggagagtgttggcatcagtgtgtttggcctgatttcttcagggggccaagctcccgggaggacccctagccaggagggccccccatgtccatccatccctcctgctggggcttggatgtcaggcttgggggctgtgagctgggacctcgcctgagcccggtcaggtgggacaggagcctgccagaagcccatggggggccaggccgggtggcttctattttatttttttagagatggggtcttgctgtgttgcccaggctggtctcggactcctgggctcaagcagtcctccctcctcggcctcccaaagttctggggctacaggtgtgagccacttctgcccagcatcccaggcctgaacagccttggcaggacccgtccctagagggggctctggtgcctcccttaggtgggccttgagctggtttttaaccaaacatccttccaaactcgggctgcgacctgcttcctgagttttctgtatttccaaggagccctccgaccagggagaggctggtggagtaaggtccagcggtattcgggggtcctctgtcacctcgccctgaaaacagcagctcccatcaccttcactgggtcccgatggagccgtctcagaggccgaggggccctctgtgtgggggtgggacgcaggggctctcagagcaagggccacaaagccgatggcacagatgtgcccctgggcctggcccgtcacccacatgtggtgccctgggccagggcgtgcgggcgccagagccttccctacacagcctaagagcaggggcaagactcggcccctcactcaccctgggaggcctgcctgggctacatggacacctgggtctctttctacccccattcaccatggaccaggggcctccatttcctgggggctcttgcggcatgtgatttgggggtccctgggacattctcccgtcagctccacctgagccaagtgtcctgttccctgcggcccttggccttccagggtcctggccaggcaggggtcaggcaccccatactcttccgtgtggcacaggtgtccacccacccccactggccacagacaccattctccccctgggagcaggaggtggagtaagttgtacccccaggcctgggtgctggggagttcctgagggcatgggtggggcaggagtgagtgcctcgtgatcccagcctcagtttctctcttgtcactttctcaaacctgcaggtctcagggccccgggctcctcctgggcaggatggggggcaggggctgggccttggggtggtgctggctctgatgattccagagcctgtatccaccttctgggctcctggccagcaccccacccccaggagccagggacaggtggcatgtgttggggtcgggggatggcccccatctcgaagtgttctggaatttgggggcaacccttgcccagcccagccatcaagaacttctgatctcctgcccaccaggaggggacttagccatggacttggccagtaggcctggggagggagggctttggcagccaaagtccactggccctgccgtgcccctgagtaggaaactgtcccctaggggctgggtggccccactgatatatgcaaacccgccggtccgagccctgttcctgcctgtgctcctctgtgcccaggctggctctcccccaaccctagcatgtatactctgccacggacgtcccgtgggccatgattgtgggcggccgcagcgggcgggggcaggcggctcagggcacactcggccgtccctgccccatcctctggcagggctgcttttgtctttgtacctttgcatcctttgtaatgaaacgtaataaaaatccaacgttttcgtcactggctcttcctcttttttctgagcccctccctcctccctcaggggtgacacatgggcgtggcaggtgcactggcaggtgcctcaacccttccgaacacacacacacacacacacacacaccccagaccaggcaagggaaggggtccccaaagctgggacaactgggaacctgccccccagaatcctggggcggacactgtatcggggtctcagctcttccatggctggcatccaggcctgtgaccatgaggtggtgggtcgtggaggtggacccaggggcctccccaaatcccaaatcacagttggacagtccctggcaggccactggcactcagcagcagctgcagcactgaggccttggtttggggttccctggcccgaccctccctcagaggcccgtccctactgtctccatgcagcaaaaaccacagccgccactccctgcacacacactttattttgtcctctctgagcccttctcacttccccctcaggacggccaccccttggggctgggtgcagagcccccatccagccgcggtgagggtggctgtcatccggcgggtcctcaccctggtccctaggcttgccgcagctgatgggtctcatagtcctctgggatggtgtctgcagggagagggcaggcgggtgagggctgagaaggccagcagggcctgtgtgcagactccccgcccacggcccgctggccctcggctcaccattgcagcggtaacgcaggttggcccagatgatgttctcctgggagaagcagaagacccccaggcggccaccccgcatggttgtgtccaagaccacgttgctgtcggccaccagctcagggccctcatagaatcgcaccctgagggtcagacatggtgaggcctgggggacctgggccagacccttccctctcagagcttcagtggccagccctggaagatgggtacccctgactgggctgcactgggagcaagtgaggcctctgccttgggcctcagtttcctggtgtggtggacatcaagggccctggacatagttggtgctaaacagagcacctgggcttgctagcagcatggaatggaggctgagaaacagggactgggtgaggccccatttctagctggatacacactgtgtgctgtgtcctggccagggtctcgctctgtcacccaggctggagtgcagtggtgcaattactgccaccttaattcccagactcaactgacctcagcctccctagtagctgggaccatgggcacgtgccaccatgcctggcatttttttttttttttgagacagagtctcactcttgtcacccatgctggagtgcaatggcacgatctccactcactgcaacttccgcttcccgagttcaagcgattcttctgcctcagcctcctgagtagccgggatgacagggccccgccaccacacctggctaatttttgtatttttagtagagatggggtttcaacatgttggccaggctggtctcaaactccggacctcaggtgatccacccgcctcggcctcccaaagtactgggattacaggcatgagccactgcgcctggcctaatttttttcttttttgtagagacagggtcttactatgttacccaggctgcctcgaactcctgggctcaagcgatcctcccatcttggctttccaaagtgatggggttacaggtgtgagccaccacgcctggaccagcataggctcattctaactgccctgtatctttcctatcgtacagatgaggggaccagggtcacacagcccctgcctggccagggcactcccacctgggcctgtgtgtccccagcccagcccaccacagagggtggagtccccacctgatgtagcccacttggggccggtgctgcaggaaccaacgataggacttcttgtccttccaacccacgtttcgcgggtccttccacagcagccgcacctgggactctgtgtctcctgtatgccacagagcgttccgcagctgttccccggggcctgtggaagacttcacagcctgccaatacccaggaaaggtggtcagagacctcgtgggccaccggagcccccctagacaccttcctggagagacagttgggagcagcaggtggtgggcggccagggggatccggatgagagacccacaaggaagccttcttcaggggccaaatggcagcttggggataggtcacagggggcagcagtggtctgcaggttcatgagaggatttgggagtccgtggacagattcagggtctgggaggatggggggctctgcagaaggacttggaaactaaggaaaagtttagggctgtgtgagagggtttagggtccataggaagactggggggccctgagaatgtttgagaatttgtgcaaggaactgggaggatttggggactgcgggagcccagaggagggctgggacagctttgaggtccatagtatgaggctagggggctggggggctctaagggctgtaaagggttttacggagggtcatgggagggcatgaggaccgcagaggtcaggcacggacggccctggcaccttgagttggatgccaggctcggccacagcacggaaggggttcgcctgccaatacgtttgctccatctgcttccacatgaccacgtagaagctggagctgtcctggtagccaaagatgaagcccgcatagtcgtcatccgtgaccgtgttcacatggaacgtgccctcgaagtccacgccattgaaggcagtgtaacctagggatggaaagagagcagtggcctttccgaacgccagccccagcccccggaacctggcacccagaacccaaacctgccccctgggtcccgatctgcctgcagacctgcaccattcccactcgcagagcccggactcagccacgccccccatctaccattggccacgcccctccagagtccacctccacttggccccgcccttcccgagcccgcccctcctctggccccgcgccttctcctcccgggcccgcccatataaccccgcccctctgtccccgcccttcctgagcccgggccagcccccttctggccccgcccattctcagcccgggcctgccccttctctggcccctctccctgagcccgctccgtggcaggatagcgctgctccccgcttctcacccacagccaggcctgggtcgctgttcattgtctgcacgatctcccttccctgatggggtcaaagaaaggagggcctcaggctggccgtgacagccctaggcaccctgtcctcagcataggcctcactgtgggggttctagggtcccatcaccccccacgtggaccccgctcccacctggttgagcaccacccagttggggtcaatctgcgcgtcaccctccgggtccagcacgactgtctggaaggccctgaagtcggtgagcgtgacttcagcgttctccggacacacgtcgatcttgtctaccaccttgtctgcatcaaagtcgtcctggcacacgtcgcccacgccgtcccctgagaggtgggagacccctcggtgggctaaagtcagggcccgcccaccgtagaccccgcgccaggagcccccactggccccgcccccaccgcaggccccgcccccgccgtactgtccgcgtcctcctggccggggttaggcaccaggcggcagttgtcccgactgtcagggactccgtcattgtcgtcgtcgtcgtcgcaggcatcaccctggccatcgtggtctgagtcctcctgggcactgttaggcaccgtgggacagttgtcccgagagtcctgatgtccgtctccatccctagagtggataggtgggatccagagacaatgagctctccagagcgttttgtcaaaggctacccggacgcccaccccaggtggcctccttactggtcttgatcgctgtcacaagcatctcccacaaagtcgtggtccacatccgcctgcggagggcagcatgcgggggtccataatcagacagaggaaatcagaaagcctcccacccaacccagccgcacagccaaggtcctcctgaccccaaggaaacccccaccgcaggctgctcggaccgagaggtcatttctctggcagtgtaaaatgctctaagctgggctgtgggctgggtaatccaacttgcagttcacccagagggcttacccagctggagtctggcctgccctcacctgatccgggttgctcttctggggacagttgtcacaggcatcccctataccatcgccatcactgtccttctggtctgagttgggtaccctagggcagttgtcggcctggttgcggatccctgcagaaatccacgggaccagagccccaagattgggaccaggccagaatgacttcattaggatgaggccagcctgaggctggcctggaacagagtcccaacttcatggaagctttttttttttttttttttttttttttttgagacagtctcattgtgtcactcaggctggagtgcagtggcatgatctcggctcactgcaacttccacctcccgggttcaaatgattctcctgcctcagcctcccgagtagctgggattacaggtgtgcgccaccacgcccagcaaatttttgtatttttagtacagacggagtttcaccatgttggtcagtctggtctcgaactcctgacctcgtgatccacctgcctcagcttcccaaagttctggaattataggcatgagccaccccgtccggcccacaggaactttaagaatgaatggtcccatccaagggaaggctagtgagggggacgggctctcactcccagggtggctcagctgggtgcccgtgtgtgccaccctgagcccctatgtccccatctgtaaagttgtcacctcccaggtcctaaaccccaggctcgaatctcttgtcctcttaattcctgcctgcggcattgacacagggaccaccttcccttccaaatatccctgcgtttttcctggccttgcagcccagcttgcatttttctggcgccccaccatggtctttggtccagggcgccctagtccagcttaccccatccggcttccaaaaccagccaagccccgccccggagccgaatcccgcccttcggtgcccgccgcctctcctcgccccccaacccccatcgagctcacggtcgccgtcgatgtcgtcgtcgcacgcatcgccccggccgtcctggtctgtgtccttttggtcgtcgttcttctgggaccggcagttgtcgcacgcatcgccccacttgtcctcgtccgtgttgcgctggtctgggttccgcaccagcgggcagttgtcctggatgacagggtgggttaagggtgagatcaggtcgagaaggcaaaggtcacactcctcagattcccaaatctccgaggacgcgtctcctcctcaaggaacctttcgcccctcctagaccacggaggccacgcccctcatccaagccacgccccatcccacttccctaggccccgctcacagctctgtcttttcttttttctttttctttttctctttctttctttctttctttctttctttctttctttctttctttctttcttttttttgagacagagtcttgctctgtcgctaggctggagtgcagtggcgcgatctcggctgactgcaacctccgcctcccgggttcaagcgattctcctgcctcagcctcctgagtagctgggattacaggcgtgcaccaccacgccccgctaatttttgtatttttagtagaggaggggtttcaccatgatggccaggatggtctccatctcttgacctcgtgatccgcccgcctcggcctcccaaagtgctgggattacaggagtgaaccaccgtgccgagccgtagatctaccttttcattggggaccccgtccccgtcggcatccggatcgcaggcgtctccgatgccatcgcggtccacatcctcctgccctgagttgggcacagtcacgcagttgtcctgggggcgggcacagaaggtgtgaggggcgcggtcatgaagtcccgccctccctcctgcccaagcccgccccgctccgcccccacccaccttacggcactggcgctccgggcagcgcagcttctcgtccgggaagccgtctaggtcagtgtcgcgaccacagaggatcccgttgccggcccagccaacggcacactgtgggagagtgtaagtgggtgccctggagtggccgccacccaaccccgcctcaagcccagcccgcccgcactcaccacgcacgaccgcgagccatcgcgctctaggacgcagtctgcatgctcgtggcactcgctgggcgagccgtcggggcagaagcgctgtgcgcgccgctggcagccggacgcctggtcgcccacgaagccgggctggcacgggccgcactggaaggagccctgcgccggagccgccggaggtcagcgcaggccgcccgccgctcgccccacctcccgcgatcctttcttcctccccagcgggccttacccgggtgttgatgcacacggagttggggacgcagttatgttgcccggtctcacactcgttgatgtccgtgcaaacctaggggaggggaactcagaggtcaccaccccacgcagacacctccggacctcccacctcctccacacttcctccgcatcctgcctctcccctccatcctgccccaaaccgatcagccctggcgcagcggacccctcctctccccacccctcccgctggaaggaggctggaagaggagtttactggtaaacaaaatggacgcccccttcccttctgctccaaaaatggggcccccacacctctcacctgcttgttggccttggcgaaagccagccccacgccctggtgggtggggccgctgtaccccggcgggcaagcctcgcagcggaaccccgggctggtgttgatacagcggactcgggggaagcaggggtgggcgttgcactgggggaggaggggccacagagggtcagagggcttcgagctgggccctgggggccgcacctcgtagtgtctcggatgtggaaagttcaagggccatatgccagtgcttggagctctgagatggaagcaattgtcgcaggggtcaggcacgactttgccttgatgacggcaagggcgcaaccgggagaggagaggagagctgttccctcatgggcgaggggaggaaggatgagggcgggcatccccagcagaggggggcaggggtcgtcggggcgtgcgtgcccggcggtggcggggggtctgggcgtgcgttccctggctgtggaagggtcgttgggactggcgatcccctgcggcgaggagggtagctggggcggaccacccctggcggtgagggagtcgtcggggcgggcgtcactagctatgtagggggttgtgggggcgggcgtcccgggtggtgacggggatggtccttgggttgggcgtccccccgcggtaaggaggtagtctggccgtgcgcccccggaggtgagaggctcttcggggcgaacactcccagtggaggaaggggtctcccgggcggcgagagattggggggcggtagagggagtcgtcagggcggtggagtgtcggggctagcgcacctcgttgacgtcggtgcagtgcgagccgttgcccgtgaagcccgcggggcaggggccgcagcgcgcgccgctctccgtctggatgcaggccacgccggggaagcagaagccgggcgcgcagtggagcaggggccgcacgctgggtaggccggtgcgtactgactgctgcatccctgcgggggggaggggggagaagcggcggggctgatcggtggctcgcccgggggcagagcctatcatggccacgccccggggctggaggcttccccttcccccccaccccccgccccggggcggcccgaaatcctgcgctgtccgcgatcccgccccagaggctgcgcgctctgaccgcggggtctccccggtctcttctctgagtctctgtcccgcttttctgccccgtggcgtctctcacttccccaaaactctctcaccgcttctgtctctttttgtctctgtttctacacaccccatcccattcccgttcgtccgtccacctctccgtcagcctccatctccttccgtctcttttcctccccagctttccctggctctctgtctctgtctctgtgtctctgtctcccgtctcttctctctcccgaccgccccgccgcgctcaccgcacgcgtcacactccatcaccgtgtttttcaggaacgtgatctccctgacctgcaggggtgggatggaatcagcggggtcccaacctctcctcatccctcgggtctcccctctctctaccccggggtccctttctacagcctcttttcgccaaggactccctacccgccgacccccttccctccccatctcctctccaccttctcgggtacttcctctctcctcgctgggaactgagacccccttccgttccctggcactccctgccccgcacccgggccccgcacctgctgccgcagcagctcccgcacgtcctgcagcgccgcgttggtttcctgcagttcccgaagcatctgcgggcccaggtctgagcctgcggcggcaggggacctggtgaggcgtcatggggccggggaatcccaccaccaactcccaccgttgcagcgaacccggacctccgaggccccactgcgctcctctagtctcggtcccgccacctgctttctgcgcccggcacgtcccctacgaacagtccgtgagccccaaacagcctggatcccgggcctctcacgggtcctacagtccgttgtggggccgtgggcacggcgcgggtgctaacgcggcttacccaacgggctctggccctgtccggacgcgccgagggcagccagggtgagcagaagaacgcaggcggtgtcggggaccatggcggtggcggggagctgggtggctgctcgctttctaccgcccacgaggcccgcggggcctatttatccccaaggcacggccggccccagggacggcccaccacagccctgcccaacgtccagcctcaaggtaaacagatggcgctggcccctgcgttcaagtccccgcccggaatgccccgcgaagtcgcccgcggctgaatccgacatggtggggaaactgagtcccggggtctgtggagagagctggtggggcagggagtcagggggtactgcccccactttcattcactgtgtgtgtgcgtctgtgtgtgtgtgtgtgtgtgtgtgtgacggggtgtggctgtatcgcatcctcttgcttcagtctcccatgtagctgggactacaagcccgcaccaccaagtccagctaatttatttttatttttatttttatttttagagaccgggtctggctatgtcctgcaggctagtagtctcaaactcccggcctcaagcgatactccccacataactgggattacaggatccagccatagcattcagctcattgattgattgattgattgagtgcttgctgtatgccaaacctgagttccagttccaaacaaggcaggctccatggccacgctctcagctcacacttcgggaaacagagtcaccagcgtctgaaaaaataggtccacccactatggatcagactgactggccctccactcctcctgaagtgcttcaaaactgggtaagttgctgggtgcggtggctcacacctgtaatcccagcactttgggaagccaaggcgggcagatcacctgaggtcaggagtttgagaccagcctggctaacatggtgaaaccccatctctactaaaagtacaaaaattacccaggcgtaattcctcccttgcacaatggaggtaataagttaataattattaattaatgattaatagtaatgatgattatgatgatgaatggaaaataggggaggggcagttgagacctgggactctcaattttcctgcctctgtccaaggaggccgcttctggccccaacgctggagggctgcaaatgactccccccaacccaactcattgctggtgttccctcccctccccatggtccctcggctggtggaggaggggacagcgttcaggatcttgccccaacccctgtccaaggggacaggcccacttggttttccaatctgcgcaatggggtgtgaggcccccatctggaggggagcaagttaaagggctctagcaaggggaggtccggggcttctgtttgtccaggctgtgccataccttccaaactgtgctccagctgctgtgggaacagcctgtaataaaaataaaagttaccgctaactggccagccacactctggagttacaaaaccccttaacctcctgcaatcagttaacactctccactcccaccttccagtactcacagcgtctattctatagacagagaaactgaggcccagagagaaaaagtgactggcctaaggccactgcccgagggcaggggtgaatctagactcagagccagatatgttttctggggagcctacagagaagtcaccgagggcttcctggaggaggtagcaaggagacagacataaaagaaaaggaggacttggatcagcagagggaaaaggtgagggcagttttggtggagggaagcatgtgaagcttggaggtggggacatttctagacacaataattatttcacaaacatcaaggactgttgtgtgtcatgtctcctgtgctgggtgatgggcacacagggtgaagaagccagacccagtctctccttcaaatggggagcccagtgggctcatggctgtgacgggacacacagacaatggtaggagtccccaggaaattgatctgtttgaaaggggatgggtcagggcgggcttctggaggaggagggaccaccaagctgaggaccggatgatgaggaggacacagccaggcagaggtagcagaaagtcattccaggtagaggaaacagcataggcaaaggccctgaggcaggaaccaacctggcccgttggatggactgacctcaaggtgacaagctcttggggctcagtgagaagcaggagatgaggctgtgtgtgaaagggcagtgctggtggtgtggggctccagtggtctcccgagggtaatggggagccacagagagtgcgtgaagagagacaggcctataagtggagtgttggtggaagcagctggtcccagccagagcatttccaatgaagcctgtcctcaatagtgcctgccctgcctgctgcctacattggggccatgagctcacctcctgttttccttggccttcagcacacctgggggccgctcctggcagcactggaattctcgggaaaaccacagctccagtggggcctgggggctggcatatgctgcacacagctaggacaggagcacatggaagccaggcccctgccacaggctggtcacagtgctggggcttggacacacgtggccttatccatggctgggccacggggagttgcagggaagggcattccaggcggagggaactacaaaggtggagttcctgagggtgtcccaagatcggacaacagaggcccggaaaggggatgtctggggtcacactcctgcctcctggatctcgccagccctgaaatcccccttctaggcagcagtcccctcctcctgtgcacaccacacttgcctcagattacagaataactcactgtaggtgtcattctgggcctttgtacctgctgttccccccacctcgtacaaactcctccatccttcaaggtccagctataatgtcccctcctccaggaagccttccctgctgatattctccagataaccttccagcctagccatgatcctcgggactgtgagtgtctgtggtttgctctgtccctccgagcctgaggggctcccacccaggggcctggactggtgtagaaaggttaggctggagggcttggtgagccgggacagcatccctatgattcgtgttcattactattttttttttttttttttgagatggagtctcacttttgtcgcccagctggagtgcgatggtgcaatctcggctcactgcaacctctgcctcctgagttcaagtgattcccctgcttcagcctcctgagtagctgggattactggcacctgccaccacgcccagctaatttttttatatttttagtagagacggggtttcaccatgttggccaggttggtctcgaacttctgacctcaggtgatccacctgcctcagcctcccaaagtgctgggattacaggcgtgagccaccgcgcctggccattactactttttataattaatgtaatgtcattactatttttttttttttttaaaatagagatgggggtcttattatgttgcccaggctagtctcgaactcctgggctcaacagatcctccttcctcggcctctcaaaaccctgggatttcagccactgcacccagccaacattatcatatgaatcctagtaacccctgccacctctgtacttgatatggcagggaagggggccacacagcctgggttcaaatattggtgagcatggccttactgtgtgacctaggacaagtcacttaacctctctgtgcttcagttttctcacccataaaatgaggatgatcactgttgagaggattgaatgagctgacccatggaaatccttcagcccagcgcccagctccagcgctactagcgtgcttattccatatgaaatttatacaccgtgggccagtgtggtggctcacacctataatcccagcactttgggaggccacagcaggtggatcacctgaggccaggagttcgagaccagtgtggccaacgtgaaactccatctctactcaaaatacaaaaattagctggacgtggtggcgcgtgcctgtaatcccagctaatcgggaggctgaggcaggagaatcacttgaaccggggaggcagaggttgcagtgagccgagatcacatcactgcactccagcctgggcgaccgagtgagaccttgtctcaaaaaaacaaaacaaaacaaaaaaacttataccctgtgcctgtcgcttatacctcagatcgttcttatttctatcttactcagagaggagaagagacagtctgaggtcacacagccagaattagaactgaggcatgcaagaccctcaagcccttcatacccgccctctctgtccttgccacagaaacagaatccagcatttcgctggcccgagcccctcattaactgggatgtcttctcggcccaggacctcctggccagagcatctggccggcgccccagccagccccacaccaggccccgtggttccaggagcccggccaggctggggaagagggacgggtgcctgcatgatggggccccggggcccttcctggcagacgtctgctcagccaggagacgtgtgggcgccccggctccctgcctcccgcccccaccgttgcctgcctttgtgaatgcagaaggaaagtatgttgtgaaggcagccgccctgccctgggcgggccgggctgtaggcccccagtctgcggaattcatcagggcggcaggggagggcagcttggcgacctctgcatcctcagcctgccttgaactgggagagacgtactggaggcatctctctagaaggaacaaaaggcaggggtgggatggggggctctgagctttgaagtccaggagacgccccccgactggccgtgtgacctttggcaggtgccacctcctctcccagtctccttttttttttttttttttttgaaacagggtcttgctctgttgcctggcctgaagtacagtgacaatcatagctcactcattgcagcctccaacttctgggctcaagtgatcctcccacctcagcctcccaaagtgctgggatcacagatgtgcaccactgcacccagccccattctccttttactcagtccctacccccattgcatcccaggctctactggatggcgataaaggaagaagacaacaataaatacagtggctacagttttcttgagcaagtgccaaatgcttgaaaccttaccactcagcctttgtgggttttctctttctgtcatcccttaagtcccagaaggcaggaatttgtcatcatgggagacagtggggcacagtgatgaaggtctcagtctctggcatcagagcctgagtttcatatcccagctctgctgtggtacatgaggcaagttgcttaacctctctgtgcctcagtttcttcttttttcctttatttcttcttcttttttttgccaccttcgaaagtttcttataatgtaaaattttacttctcaggttactatactgaagagttgcttcaggagagaaagaatttcaccagaggccgggcgtggtggctcacgtctgtaatcccagcactttgggaggccaaggagggcggatgacctgaggtcaggagttcaagaccagcctggccaacatggtgaaaccctgtctgtacaaaagtacaaaaattagccgggcatgatggcaggtgtctgtaatcccagctacttacttaggaggctgaggcgggagaattgcttgaactcaggaggcggaggttgcagtgacccgagactgcaccattgcactccagcctgggcgacagagtaagactctgtgtcaaaaaaaaaaaaaaaaaaaaaaaaaaaaaaaaaattcactaggaacagataggaatttcacaatattcaattgatactggtttctttcttttttctcttttccttccttccttccttcccttcctccttcctccctccccctctcccttccttcttccctcctccctgtctctctctcttcctctctgtctccatttctttcttgtttttgaggtaggttcccgctctgtcaccccagctggaccgcagtggtacaaacacagctcactgtagctcaaactcttgggctcaagccgtcctcacacctcagcctcctgattagctggggccaaaggcatgtgccaccacacctggctaattttttttattttgtagagacagggtcttgctctgttgcccaggctgctctctaactcctgggctccagtgtcccttccatcttagcctccagggtagctggaattacaggcataacacctatatttaatgaaggtttcatgcagtcaaataaactagtgtctgtgttctgaggggaggagagtgccttcagggctaactgtagaagctttgttctctccttcagtctctctgtctaatgaagtgaaaatggaaatgtgtaaagttttacgcaaggtaacggtagcaggaaaaaccaaggtgaatataagtatgagaagaatcctgacctcttagcgtcagtgtaagaattgaatgaattagcgcccagaaagttcacagcccttgcttgggaggcggaagtgggaggatcgcttgaacctaggagttcaaaaccagcctgggcaatatagcaagaccctgtctctaaaacaaaacaaacaaacaaaaaaaaaatttaaaattagccaggcatggtggtatgtgcctgtagtcccagctactcaggaggctaaggtgggaggatggcttgagcccagaagtttgaagctgtaatgagctatgattgtaccactgtaccccagcctgggtaacagagtaagacctcgtctcaagaaaaagaaaggcccaggcgtggtggctcacgcctgtcatcccaccccagcctgggtaacagagtaagaccctgtctcaagaaaaggaaaggcccaggcgtggtggctcaagcctgtcatcccagcactttgggaggctgaggcaggtggatcacttgaggtcaggagttagagaccagcctaagcaacatggtgaaaccccatctctactgaaaatacaaaaattagccaggcatggtggtgcatgcctataatcccagctactcaggaggctgaggcacgagcgttgcctgagcccaggaggcagaggctgcactgagctgagatcatgccactctcactccagcctggggtgacagagtaagacagagtaagactctgtctcaaaaaaaaaagaaaaaaaaaaaaggaaaagaaagagctgagccctcaatcaatgtcagctattaacatccccattttacaggttggcaaactgaggctcagcaagtctgtcctgtctcctcaatttggtcactggatgctcagagtgggaagtcacctcctaccgctgcctaaggctccaggagagagtctcccaaccaggcttctgcagttcccgctggagaaggtagggtgggctgtcagcagagaaagtggagagtgcagggaccagagcactactgcagttcctcagtacccctcgtgcccctcccagcccctacctgggctcattaacaggaggcccttgttcaggggagtgatggatggcgtgggaggccgagggcggggtgtgtttacccaccggcggctgcagacaggagcccaggccagggccgggccagtaggggagggaggctcccaggtagggaggagcccagccccaatactgctgcacggaaaggggccagctgggccccttctggaaacagaggccaagggtcagggaggccattctgctggggaaattggtgccgagagttgaacaagtgaacaggtgccagcagagcagagccccaggcagagggcacagcaggggcaaaggcccagaggtgggtatgtgcttgatgtgttggaggttccgcgaggcgtcaggagtggctgcagcaagcggggaggggaaatggaggaaatcttccggctgtgagccatgtttaggctccatgggcgtgtccattcccacatctttctgcacgccaggcccttacctgggctgtgaccgctccctggtgccctgtctgctttcacatggctcattcctcaccccggctggcttagaggctcccgctggccttcacaggcccttggtgtgctccatcagagctgtgaccatgctgtatgggcactgccaggttacacgggtcatggggctgcctcctccatcagactgagctccaccatcttgttcccctctgtgttccctgcatatacacatgatggaatactccaataatggatggacagatggatgtataagtggatggatggatgagtggatggatggatggataagtggatggatggatggatggataaatgagtggatggatggatggataagtggatggatggatggatggatggataaatgaatggatgtatggaggatggatggataagtggatggatggatggatggatggatggataagtgcatggatggatggatgggtaagtggatggatggatgggtaagtggatggatgaatggatggacaagtggatggatggatggatggatggatggatggataaatggatggatggatgaatggataagtggatggatggatggatggatggataggcaaatggataaataagtgaatggattgattaatggatggatggatgatgtataagtggatggatagatggatggataagtggatggctggatagacagatggataggtggatgggtgcaaagataatgaattgatgaatagatggatgaatgatgtataagtgaatggatggataggtagatggatgggtgaatggatggatggataagtgaatggatggataaatgaatggataaggagatatattgtatggatgaatgaataagtgaataaataatggataaatggatacatttatacatgtggatggataatgtataaatggatggataaacagatgaatggatgcataagtggatgtataaatgaatgaatgaatgggtggatggatagataagtgggtatatagatgaataagtggatggatggatgagtaagtggataaatggatggatggataggtggataggcagctgaatggatggatgatgtagaagtggatggatggatggatggatggatggatggacagataagtagatggatggatagataagtggatggatggataagtggatgaatgggtggatggatagatggatggatggatgatggagtaaagaaaagctacaagaccacaaaacaaggatccacaggactaagaaatgacagaatcacatcactggttaatggagcaactgaactgtggagtcctagggccacgggaccacagagttagagatccacgcagtccagtcaacagaagcacagaaccgaagggtagttggaagctataggaccccagtgggggcagagacaagccattggggcatcccacatccacggtgccaccaggatagagtctcagagttgaccccaacagaaccaccctctggccacaccctcacctctcagctctccaaggagcctcccaggggccactgaagccacagggtgctttttcccccaatctgtggagcagccttgggggacaggaccatgccatcgccaatgcctgcagccagtcagcctccaaacactcagtgagtcccggcaccagggccaagtgaggctgtccaagtaccaggaaacactgccagcctctggccaggctcctctggacgccgagtgctctgcagccaggggcaaaggaatcaacgggtaacgtttacatccatgtcccttccaaagccagcagcaacatagcatggaggggaggccgtgccccagctgcgtcccctccgggccacggtgcactgactagctgcccgctccatcgccaggagtcacagctcagctcgaatttctcgacacatccacgtattaatgagctctcccaagacagcacccgtttgcccagcagaacttgcacctgatgcccagaacaaccagcccatttgagatgggggaaactgaggcccttgtctcagaggtgagcccaggaacacagcaggctggagctgagtctcaatcccaagcctgcaggatgctaaacctgaacttatcatcacccagttgggctgcctctcaggccccagccccttgtcctgggacccccccacttccccaccaggtgtttgcttccaaatgtggtgcattgcagaatgccaagagcacgggctgcagcagtttcttcccttccatgggctcagaatatctagctcacagggctgtggtggagaaaaactgtggtcatagcacagaaaggggacctgattgctggcctgataggagccttgcccacaccgtttccccctcccttcttcttcttcttctttttcttcttcttcttcttcttctttttttttttttttttgagatggagtctctctctgttgcccaagctggagtgcagtggcatgatctcagctcactgcaacctctgcctctgggttcaagagattctcctgcctcagcctcccaagtagctgggactacaggcatgagccaccgtggctggctaatttgtgtatttttagtagagacatggttttgccatgttggccaggctggtctcgaactcctgatctcaggtaatccgcccacctcagccttccaaagtggtgggattacaggcctgagccaccgccactagcctttttttttttttttccgctaggtttcgcttgtgtgattacctcattccatcttacatatgaaaaagtagaaggcaagagagtgaggttctaatcctcccgatacccaccctggcagcttcagggagggtttctcgcatctgcagtgtagtaaaaacatggcattgctgggcaccgtggctcacacctgtaatcccagcactttgggaggctgaagcgggaggatctcctgagcccagcagttccagactggcctgggcaacatattgagacctcatctctacaaacaagcaacaacaacaaaaaggctggagtgcggtggcacaatctcagctcactgcaacctccacctccccgctcaagtgattcacttgcctcagcctcccttgtagctgggattacaggttcttgccaccacagcaggctaatttctgtatttttagtagagacggggtttcaccatgttgcccaggccggtcttgaatttcagacctcaggtgatccgcctgcctcggcctcccaaagcgctcggattccaggcgtgagccactgcccggtctgcctgccctttctgaatagcaaggatggacccctgaagtgccaggctgaaattccgccagctcactgagtggggaaacaccctctccctgacgaactcagcaaagatctcaaggctaactctcataggctcagccctgaaccaatcactgcagtcggtgggtggagggctttgattggctgggccaggagcctgagtcccctctggaggttggaggggcaggggccaaaggaggatggtgtcagtaactcgtggtgcaggcaaacttgatggaaactgaatccccacccagactcttgccttagtgggtctctggcaccacgggctactctgagtggctttttctgggggtagggggagggacggaatctcgctctgtcctccaggctggagtgcggtggcgcaatctcggctcgttgcaacctcggcctcacgggttcaagcattctcctgcctcagcctcccaagtagctgggattacaggcgcccactacaacaccctaatttttgtatttttagtagagatggggtttcaccatgttggccaggctggtctcaaactccttacttcagatgatccgccctcctcggcctcccaaaatgttgggattacaggtgtgagccaccgtgcctggcctgagtagctttaacggggtgaccctggccatgtgccaagccccatcccctgtctctacctccggctgctgtatttgaggccccttcttactgccctctgcttgcaggaaggtgggttcttccttactctgctggcctcccgacctcccctgggtaccaagccaccttaagcatcacaaggaaacaggcattacctggaagagtccccaccaccagtttctttccaaattgctgctggtgggccaaggtgcggaggctcatgcctgtaatcccatcactttgggaggccaaggtgggtgtatcacctgaggtcaggagttcgagaccagcctggccaacttggtgaaaccccgtctctactaaaactacaaaaattagcggggcgtggtggtgcctgcctataatcccagctactcagggggctgaggtgggaggatcacctgagcctggggaggcagaggttgcagtgagctatgatcgtgccactgtactccagcctgggtggcagagtgagatcctgtcacaaaaacaacagcaacaacaacaacaaaaattaaggaagggaattccaggcagagaggtgagcttgtgcaaaggccctggggtaggaagtaattttcttgttggaggaggtgaggaggccgatgtgactggagcagagtgagggaggaggggggagatgggttagagagatgggccaaggtgggatcacatgggggccttgcaagctgcagcaaggaggtgggttttattctgagagcaatagggagccatggagagtgtgtgagcaggggaggaacatgatttatgattttaagccatctcttgtggctgcaatggggaagaggccaggcaatgtcaaggcaagagctggtggggccagggccagggcacggccacagggtggggaggagaggttagatttgtttgttttgaagcctgagaggactagagctactgatgagcttgggaaggaagggagggaggagtctcagacgcgcccagatcttgaacccatcacaaggtggttggtagggttgttgcccgacacaggaagacttagcagaaaaccatgaaccccaccttggccatgttgttgctgaggtgtctggtctgggctggccaggctccagatggaaccgtggaccttgtgggcaaagagtggcctgtgacttccaggcctgggctgtgtgcgttgcagggagatgggcaggggtctctggctgcgtccttgatccccatcctttgtgcaaacaggtggggtggggcagggggaacccatgttttccccatcccgggtccttttgttccagttggaagccacgaccaattcgaaaagtccagatgtggagttggacgcaacccttggaccgtgcggtctggggaggccagtggcccgtcatccaacaggtcaggcctccatgtggcctcgctggctgtggcccggctggggctggggggcagaacggctttgatttcgagtctctggctgaatctgcaaaggttaaaaaaataatcaccagcaccaaggcgttgccccttcaagacgtcaatcccaacaccaggcggaaaaaacaggccctggggcccctgccagcccacaggcctgagacctgcagaggggcctgatcagaaggccaaaaagctgggtccccacatctctccgggcacaaggggagactcggcttcccgtctggaacacagggcattgctgtagaagcgcatccacgttcaaggtcaagtgcagcatctacctgcctgccaagccctggcccaggcagtggggacccatgaggcgagtcaaggttggccccggtctgtagggctcccaggccagagatggggtttccccatgctggtcatgctggtcttgaactcctgacctcaagtgatccacccacctttgcctcccaagtgctgggattatgggtgtgagccattgcgcccagccccttccttcatatttacataaaatacccttctgtgacccaggacttggcttaaatgtcaacacctcaggagacctttcccaacccatgggcaaaaatacctacacccaggtatttctttcagacacttctcactcttggaaatgatcttctcggctacattttcatgaggttgggaacgtggtttatccgcagtttgtgccattgtacctggcatatactaggtgagattgtctccttggggacaaaggaggatgctggctatcacaacaaagtttcacaaacatataccctctgagacccccagacctcccccagcagtgccccaggatttacaaccagaactttatttatttatttatttatgagctggagtctcgctctgtcgcccaggctgaagtgcagtggtgcaatcccggctcactgcagcctcgaccccctgggcttgggtgatctttccacctcagcctctcaagtagctgggaccataggcacatatcaccctgtccagctaatttttatattttgtagagacaaggtcttgctgtgttgcccaggctggtctcaaactcctgggctcaagtgatccaaccaccttggcctctctaagtgctaggattacaggtgtgaggtaccacacctggcctacaacccagaaatttgccctcaataaatggcagagtgaggctggtcacagtggcacacatctgtaatcccagcattttgggaggccatggtgggaggatcacttaagaccagaagttcaagaccagcctgggcaacatggtgaaacccccatctctactaaaatacaaaagaaattagccaggtgtggcggtgtgtgcctgtagtaccagctactcgggagactgaggcaggagaatttcttgaacctgggaggcaaagattgcagtgagctgagattgcaccactgcactccagcctgggcgacagagcaagactccttctctaaaaaaaaaaaaaaaaaaaaaaaaaaaaaaaaaatagggccgggcgcgatggctcacgcctgtaatcccagcactttgggaggccaaggtgggcagatcacaaggtcaggagatcaagaccctcctggctaacatggtgaaaccccgtctctactaaaaatacaaaaaaattagccgggcgtggtggcaggtgcctgtagtcccagctacttaggaggctgaggcaggagaatggcgtgaacctgggaggcggagcttgcaataagcagagattgtgccactgcactccagcctgggcgacagagcaagactccatttcaaaataaatacataaatacataaataaataataggcaggcacagtgactcatgcctataatcccagcactttgggagtgccgtggtaggaggatcacttgagaccaggagttcaaggccagcctggataacattatgagacctcacctcttttttttttttttttttttgagacaaagtctccctctgttgcccaggctggaatgcaatggcgtggtcttggctcattgcaacctctgccgcctgggttcaatcgattctcctgcctcagcctcctgagtagctgggattacaggtgcgcaccatgacgcccaggtaacttttgtatttttagtagagacggggtttcaccatgttagtcaggctggtctcgaactcctgacttcatgatctgcctgccttggcctcccaaagtgctgggattacaggcgtgagccacagcacccggccgagacctcatctcttaaaaaaaaattaggccaggcatggtagctcatgcttgtaatcccagcactttgggaggctgaggtggggctaaggtcaggagttcgtgaccagcctggccaatatggtgaaaccccgtttcggctgggcgcggtggctcatgcctgtaatcccagcacttgggaagacaaaggtgggtggatcacgaggtcaggagatcgagaccatcctgcccaacatgatgaaaccccgtctctactaaaaatgcaaaaattagctgggtgtggtggcacgttcctgtaatcccagctaatcaggaggatgaggcatgagaattgcttgaacccagcaagcggaggttgcagtgagccgagatcgcgccactgcactccagcctggtgacagagcgagactctgtctaaaaaaaaaaagaaaaaaagaaaagaaaccccgtttctactaagaatacaaaaattagctggatatggtagcaggcacctgtaatcccagctacttggaaggctgaggtaggagaattgcttgaactcaggaggcggaggttgcagtgagctgagattgcaccattgcactacagcctgggtgacagagcgagactccgtctcaaaaataaataaataaaattaaaaaacaataataaataaaataaataaatggcagagtggtttgagtcatgctggaggcgcacaggcagctatggagggtcagcaggagggactgctatgctgcgactgaaggagagatgagaattggcctggtaagaggccacagagggtgctcgggtggggggaccagcgtgtgtaaaggcttggaggcgacagagaacgatggagtgtttctggaactgtgtgtagaggggcccaactcacacagagtgaggggagaaagggccatactgctggaagggcccacaagccctgggacgatgggacttggactccatcccagggcaatggggagccatgggaggtatgtgagcagaaggcacatcagacctgtaccccctcgtcctgtgccaggtaccgagaggctccctcccagacctgggaaccccatgggctcaacatgcatggtagacacatctcaaagcagttttatgtgaattcctgaggagagctgtctccaacaggccaggccacccgctatcctcaccaccacggggctggggaggtctgtcgtccacaggagcctcccagacccagataatgcgctgacagctgcctggccctgcctgggcctcgaggcctccccccagcatggctgggttcccccgaggcccgggtctgactaccccttcccggcctgactaccccttcctggccctcggtggatgctgaagacatttcttcttattccgctggaattttcctcgtggaccatgccagcgcctccagaaacacatgaaaggaaaatgtttccagtctgagcagggctgttttattgctctccgggctgggagtctgaccacagagtggaaagggctcgtcataccactgttcctcctgctgaagcggctcggacccggcccgccctgccatgccctccttggaggcccgggttctgcagggtttttttttttttccttttttttgagagagggtcttgcgctgtcacccaggctgaacaggctggggtgcagtggtgcgatctcggctcactgcagcctccacctcctaggctcaagcgaccctcctgcctcagcctcctgagtagcagggactacagtctcttgccaccatgcctggctaactttccaaaactttttgtagagatgggatctccctatgttgcccagtttggtcttggactcctgggctcatgtgatcctcctgcctcggcctcccaaagtgctaggatgacaggcatgaggcattgctcctggcctctgcagggtttttccagctaaggaaagtttcccctgcccttgtccccctgaccagggagcaactccctcaaaaaatagaggttgggggccgggcacactggctcatgcctgtaatcccagcactttgggaggctgaggtgaatggatcacctaaggtcaggagttcgagaccaggctggccaacatgatgaaaccccgtctctactaaaaatacaaaaattagcctggtatgctggcacatgcctataatcccagctactcaggaggctgaggcacaagaatctcttgaacctgggaggcggaggttacagcgagctgagatctcaccactgcactccagcctgggtgacagagtaagactctgtctcaaaaaagaaaagaaagaaaatagaaaagaaaagaggaaaggaaaaagaaaaatagaggttgggagctcaaccttggagctgatgcgtttttccatcgtttattcattcaacagtctacttttttcccagagtgtgcccatttctgcatcgggtgctggggcgcaaatgggaacaaggaggatctgtcactattctttgggagctcgtggaaaggtggaagggggggcttcatgtgaccccattcccagagctgaacatggaggcttggggggaagctgcttgcctgagatggtgcaagggaataagtgacagggtcagaacgcaacacacagagtggctccaaaaccggttttctggtgtggtggcccgtgcctgtaatcccagccactcaggaggctgaggcaggagaactgcttgacccctggaagctgcactctagcctgggcaacagagtgagactcagtctcaaaaaatatataaaataaaataaaataaagtgcacaattccctggcattcagtgcacacaccatgttgtgcaatcactacctcgatctacttccagactatttcgtcaccccgtaaagacgctccgttcccatcagcggtcactcccccttcctctccccaggccctggcaaccacaaatctgctttctgtctctgtggatttgccagttctggccatttcctacaaatggaatcacacactatgtgacatttcgtgtctggcatctttcacttggcatgtgtttttggggttcgtccatgctgtagcagggagcagtgcatccttcctcttttgttttgtttttgttttgtacttcattcctttttgtggctgaatcatattccattgcatagatggaccacattttgtttatccattcgtctgttgagggacatttggatcatttctactttttggttatttaatttccttttatttatttattttatttttgagacagagtctcactctgtcgcccaggctggagtgcagtggcgtgatctcggctcattgcaacctccgcctcctgggtttcagagattcttctgcctcagcctcctgagtagctgagactacaagtgcgtgccaccacaccccagtaatttttgtattgttttgtgtttttttttttcctttttgagatggagtctcactctgtcacccaggctggagtacagtggcacagtctcggctcactgcaacctccgcctcccaggttccagcgattatcctgcctcagcctcccaagtagctgggactacaggtgcatgccaccacgcccggttaatttttgtattttttagtagagatgggatttcaccatattggccaggctggtctcaatctcctgacctcatgatccatctgcctcagcctcccaaagtgctgggattacaggcatgagccaccacgtccggccctaatttttgtatttttaatagagacagggcttcaccatgttggccaggctggtctcgaactcctgacctcaagtgatctgccaaccttggtcttcccaagtgctgggattacaggcgtgagccaccgagtccagcctttttttaggggacagcagggtaactctccgtcacccagactggagtgcagtggcgtgatcatggctcatggcagcttcaacatcctgagctcaaatgatcctcctgcctcggcccccaaaatagttgggactacaggttcatgccactatgcctggcttattttttctttttctttttattatttatttattttttgagatggagtttcgctctgtcacctaggctggagtgcaatggtgcgatctcagctcaccaaaatctccgcctcccgggttcaagtgattctcctgcctcagcctcccgaggagcggggattacaggcatgtgccaccatgcccggctaattttgtattttcagtagagacggggtttctccacgttggtcaggctggtctcaaactcccaacctcaggcgatctgcccgcctcagcctcccaaagtgttgggattacaggcgtgagccatcacgcctacttcctttctcacaattttaaacagtgctgttattggcctggcaccgtggctcatgcctataatcccagcactttgggaggccaagatgggtggatctctttgagctcaggagtttgagaccagcctgggcaacacggtgaaactctgtttctataaaacataacaaacaaacaaacaaacaaacaaaattagtccggcttggtggctcatgcctgtagtcccagctactcaggaggctgagtagctctgtcgcccaggctggagtgaaatggtgtgatctcagctcaccgcaacctctgcctcccagattcaagcgattctcctgcctcagcctcctgagtagctgggattacaggggcccaccactacgcccagctaattttttgtatttttagtagagacagcatttcaccatgttggccagggtgaccttgaacttctgacctcaggtgatctgccagcctcagcctcccaaaatactgggattacaaacatgagccactgtgcctggcctagacctcatatttttaaaagcagctagtcagggttttttagagaaatagaagcaattggataggcatgtattgatagaaaaagatttattgtgagggattggctcacacacttatggaggctgagaagtcctactatctgctggctgcaaactgtggacccaggaagccagtgatgtctttttttttgtttttttgtttttgtttttctttctttctttttgagatggagtctcactctggcccaggctggagtacaatgacgcaatctcagctcactgcaacctccacctcccaggttcaagtgattctcctgcctcagcctcctgagtagctgagattacaggtgcgcaccaaccatgctccgttaatttttgtattttttagtagagatggggtttcaccatattggccaggcaggtctcgaactcctgacctcatgatgcacctgcctcggcctcccaaagtgctgggattacaggcgtgagccactgtgcctggcctcgttgtttttcttgagatagagtctcactctgtcacactggctggcgtgtagtagcacaatcttggctcaccgcaactttcacctctcgagttcaagcgattgtcctgcctcagcctcccgagtagctgagattacaggcacgcaccaccacatcccactaatttttgcatttttttgtagagatgggttttcgccatgttgcctaggcaggtcttgaccgcctgggctcaagcgatcctcctgcttcgaacttgcaaagagttgggattacaggtgagagccagaacatctctcgtttgatcttgtcaccttctaacacatgacaccagtttcttattcctgatggctttgttattgttcttctctctactagagtcggctacatgaggccacatggtcgtctgtgaattggggacagtgacacccacctcgatgtgtatatagggtgggggtccacagggcccacagggaagtgtatttggtttcccaccatcacaccttccaaaacagcctcggtagccggatgtggtggctcatgcctgtaatcccagcactttgggagactgaggcaggatgattatttgaggccagaagtttgagaccagcctgaacaacataacaagacccctgactctacaaaaaattaaaaaattagccaggtgtggtggcccatgcttgtagtcccatctactgaagaggctgaggtggaaggatcactttagcttgggaagtcaaggctgcagtgagctatgatcgcgccactgcacttcagcctgagtgacagagcgaaaccccgtctcaaacaagcaaaccaacaataataaaacagccacagtgaacttccatccaaaatatatcccaggctgggcgcggtggctcatgcctgtaatcccagcactttgggaggccaaggtgggcggatcacttggggccaggagtttgagaccagtctggtcaacatggtaaaacctcttctctactaaaaatacaaaaaattagctgggtgtagtggtgcacgcctgtaatccaagctactagagaggctggggcagaagaatcgcttgaaccccggaggtggaggttgcagtgagctgagaccgtgccactgcactccagcctgggagacagagcacaactctgtctcaaaacaaaaataaaaacaaaaacaaaaaacaaaatatatcccagcctgaagcctggctcgggaattccaaggggtctgcaggggctaccttcctctccagacactgtcagcaacctttaccaccctcaatagcagccttgagtctctgcagcaaccaaagctttgaggccaagccaaaacccacctccctgacacgctagcacatccccaaaaaagcaacctgtgatcgtagaatcaaggtggctgccggcttgcccccgccacctgaggtttacacagacccaccatccccttcaaagacactgttcaaagcaaggagagctctaacacagacacacacacacctatttttcttttcactaccagcatgcccgggtgtgcctgaggcttggctgtgtatccagatcccacaaggggctcctttgaaacaggaatggggccacagaggaggggcccacaggaacccgcaagcacccactgttcctagggaggagtgctgtacatggagggtcccgggtccacccgaactggccacacttctgcaagggcagccaccgcgagggccacgtctgtggaagctgggagctcaacaaaaagggtttcttttttttcctttttttgagatggagtctcactctgtcacccaggctggagtgtagtggcgtgatctcggctcactgcaacctccgtctccctggttcgagcgattctcctgcctcagcctcccgagtagctgggattccaggcacccaccaccacgcctggctaatttttgtattttttagtagagacgggatttcaccatgttgcccagactggtttcgaactcctgaccttcaagtgatctgcccgcctcagcctcccaaagtgctgggattataggcatgaaacaccgtgccctgccaacaaagtggattttaaagagacccaagtctgggctgggagaagccactgcaatatcctaaatatccttttcccaaagccgtggaatttctctgcagcggccagggccaacgcttaccctcgagggacctctcttggtatgaaggaaaaattccattttcctggacctggggaagctgatgtggaactcgaggaggggccagcctacgttgagagcagacacagggcacagggtaggttataaatttaggactccaggctcaggggcgtgaccaggctgatttaggtcttcaagcaggacagtgctagggatggcctcattcaatatttttttcttttctttttttttctgagatggagtcttgctctgttgcccaggctggagtgcagtggtgtgatctcggctcactgcaacctctaccacccgggttcaagcgattatcctacgtcagcctcccgagtagctgggactacaggtgagcgccactaggtctggctaattttttgtatttttagtagagacggggttttgctgggttggccaggctggtcttgaactgaactcaagtgatccgcccacctgggcctcccaaaatgctaggattacaggcatgagccacggtgcccagcctcattcatttttttttttttgagatgggatcttgctatattgcccaggctggtctagaattcctaggctgaagggatccttttgcctcagcttcctgagaacctgggactacaagtgcatgccaccatgcctggcaaggttggcctcattctgtctggaacccggcctagactgggcgagagagacacttgtgataaagacccatggagacttcaatttgtctgaaacttttaaaaagtttcaataatgagccgggtgcagtggcttatgcctgtaatcccagcactttgggaggccaaggcaggaggatcacttgaacccaggagtttgagacaagcctgggcaacatggtgagaccctgtctctataaaaaagtaaaaaaaattggccaagcacggtggctcacacctgtaatcccatcactttgggaggccgagacgggctggatacctgaggtcgggagttcaagactagcctgaccaacatggagaaaccccatctctactaaaaatacaaaattagccgggcgtggtggcgcatgcctgtaaccctagctacttgggaggctgaggcaggagaatcgcttgaactcaggaggaggaggttgcagtgagccaagatctcaccattgcactctagcctggactagagtgaaactctgtctcaaaaaaaaaaaaagtgaaaaatgtagccaggcatggtggcccgtgtctgtagtcccacctgcttgaaaggctgaggcaggaagattgcttgaacccaagagatcaaggctgcaatgagccatcacggtgccaccagcctgcactccagcctgggcaacagagcaagatcctgtctcaaaaaatatatattcaataatgaatcgtcacaatttagacaaagaaaagaacgcaagcattcataaatagctcctgctcagtggcggctggtcagataccaggtgccaccatatgcccctcatgtatcactctctggggtgttgggggtgtcactagattccatttctcaggtgaaacacagagagaccaagacattggagagaggtcacacagcaagcagatggctgggcagacatgtgaattcagacgtgatgtagttgacccagactcactatctccatcccctgtggtttgaacacagtgatgtgtcatatgtctgccagcactttcatcttgaacttcccgggctcaagaactataagcaacacatttcagtttttcttttttctttttctttttatcttttgagatggagtcctgctctgttgcccagactggagtgcaatggtgcgatctcagctcactgcaacctcggcctcccgagttcaagtgattcgcctgcctcagcctcctgtgtagctgggaatcacaggcactcaccaccatgcctggttaattttcatatttttagtagagacggggatttgccatgttggccagactggtttcaaactcctgacctcaggtgatccgtctgccttggctttccaaagtgctgggattacaggcgtgaggccactatgcctggcccagtttttatttttatttttgagacagggtctcgctctgtcgcccaggctgcagtgcagtggtgtgatctcagctcactgcatcctcgaccttctaggctcaagcaattctcccacctcagcctcctgagtagtggggactacaggcccacatcaccatgcccagctaatatgtcaaaattttttgtagagacagggtctcactatgttgcccaggctgttttcaaactcctgggctcaagcgatcctcctgccttggcctcccaaagtgctgagattacagacgtgagccactacacctggcccctgccaaatatttttaatccccacttggttgcgtctgaaggtgcagggccgactgatagagaagatcactgtattgtttgttaggtttttaaaaatagctagaaaaaaaaatctgcaccataagacaggttgagaaaaaataactagtagccaagtaaacaaaagtggtcatgggccctccagtgatgactagaccaagcactgtttttattctcagcctctccatatgacatactagaaaatccctctggagaggggattacatgcagatgccagccggatgcggtggctcatgcctgtaatcccagtactttgggaggccgaggcgggcagatcacttgaggtcaggagttccagaccagcctggccaacatggagaaaccccttctctacagaaaatacaaaaaattggccaggtgtggtggtgggcacctgtaatcccagctacttgggctgaggcccaagaattgcttgagcctgtgaggcggaggttgcagtgagccgagatcgcgccattgcactccagcctgggctacagagtgagactttgtctttaaaaatatatatataaaaaataaaaataaataaatgcaaatgactgggcccacctaggactctcttaaactgagtgcctgggtggaggtggagggtgatcctcggagactgtgcccctcgaatccgagatgtctgcatccaggggaagtcttggtgcctttgaaagtccttttgtccccactgggacaaattatcccttttttgttgttttttgagacatggtctcgctctgtcacccaggctggagtgcagtggctcgatctcggcttactgcaaactccgcctcccgggttcaagtgattctcctgcttcagcctcccaagtagctggattacaggcatgggccacaacacctggctaatttttggattttcagtggagacgggatttcaccatgttggccaggctggtctcgaactcctgtgctcaagcggtcctcccttctcggcctcccaaagtgttgggattataggcgtgagccactgcgcccagctgacaatttcttttgggtgattttttagagtctccagttgaatcccacttcccaagccccatgccagattcaaagacagctcacgtctctgtccaagcctcaatctccccctctggaaaatgggttgataccacctgctctcagaattgctgggcactgcttgttaactgatggtgtcctgttttttgtgtcacactaaggtttcgcaacctcagcatgttgacgtttggggcaggatagttcaatttttgtgggggactgtcccgtgcatcatagatgtttaggagcatccctggcccctacccactagacgacagtaaagagttgctggattcagcaaatataaatacagaaaaccccgttaaacgtaaactgcagataaacaaatactgcttctgcctaagtatgtctcaaatgttgcatggcacatacttatactaaaaagacatttgagccaggcgcgttggctcacgcctgtaatcccacaactttgggaggccaaggcgggcggatcacgaagtcaggagttcaaaaccagcctaacatggtgaaacccctctctactaaaaaataaaaattagccaggcgtggtggcaggtgcctgtaatcccagctactcaggagcctgaggcaggagaatcgcttgaacccgggaggtggaggttgcagtgagctgagatcgtgccactgcactccagcctgggtgacagaacgagactccgtctcaaaataacaaacaaacaaacacaactcacagaataggagggaacatttgcaaatcatgtacctgctaagagatttgtatccagaatagaaaaataacttttttttttttttttttttgagatggagtctcgttctgttgcccaggctggagtgcagtggcgtgatctcggctcactgcaagctccgcctcccgggttcaggccattctcctgcctcagcctcccgagtagctgggactacaggcgcctccaccacgcccggctaattttttgtatttttactagagatggggtttcaccgtgttagccaggatggtctcgatctcctgatctcgtgatccacccgcctcggcctcccaaagtgctgggattacagacgtgagccaccgcgcccggccgaaaaaaactcttataaatcaacaataaaaagataaataacagaatgtatttgtttagttatttatttttcagagacaggatctcactgtgtggcccagacttgagtgcaatggccccattctagctcctagctcactgcagccttgaattcccgggctcaagcgatcctcccacctcagccttccaagtatctaggactacaggtgtgtgccaccatgcctgactaagtttttgcttttatttttggtagggagacatcttgctgtgtttcccaggctgatttcaatctcctggcctcaagcaatcctcccacctttgcctctcaaagcactagacggtgtattttcttacaagggcagtgatcccatcatgcggtactcccctcatgacctcatctaaccgtgatcacctcctagaggccccatcttctttttctttttttttaggatggagtcttgctctgtcacccaggctggagtgcagtggtgtgatctcggctcactgcaagctctgcctcccgggttcatgccattctcctgcctcagcctcccgagtacctgggactacaggcgcccgccaccatgcccagctaatttttttgtatttttagtagagatggggtttcaccgtgttagccaggattgtcccgatctcctgaccttgtaatctgcccgcctcagcctcccaaagtgctgggattacaggtgtgagccaccgcgcccggctgaggccctatcttctaataccataacaatgggggtttaaaatttcacaagatgcattttttttttttgagatggaatctcgctctattgcccaggctggagtgcagtggtgcagtcttggctcactgtagcctctgcctcccaggttcaagcaattctcctgcctgagcctcccgagtagctgggattataggcatgtgccaccatacctggctaatttttgtatttgtagtagcaatgcggtttcaccatgttggccaggctggtctcgaactcccaacctcaggtgatctgcccgcctcctaagcctcctaaagtgctgggattacaggtgtgaaccaccgtgcccagccaccatatgcattttatggagacaagaacattctgtccttaacaggcaccaagatcattcagcaggggatagaagggcatcttcagcccgtggtgctagaatgactttgcatccacaggcaaaggaatgaagttggatccctacctcctaccatgctcaaaaaatgagctcaaaatggatcaaagccctaaaggcaatagctaaaaccataaaacttttttctgttgcccaggctagagtgcagtggcgccatcttggctcgctgcaacctccacctcttgggttcaagcaatcctcctgcctcagcctcctgagtagctgggattacaggcgtgcaccaccacacctgggtaatttatggttttctttttttttttttctttttttttgagacggagtctcgctctgttgcccaggctggagcacggtggcatgatctccgctcactgcaagctccgcccccctaggttcatgccattctcctgcctcagcctcccgggtagctgggactacaggtgcccgccaccacgcccggctaattttttgtatttttagtacagatggggtttcaccgtgtttgccaggatggtctcgatctcctgacctagtgatccacccgcctcggcctcccaaagtgctgggattacaggggtgagccaccgcgcctggcctaatttatgtatttttggtagagatggggttttgccatattggccaggctggtctcaaactcctgacctcaggcgattcgcccaccttggcctcccaaagtgatgggattacaggcatgaaacacagcgcctggtcttttttaaaaaaatgttttgaggcagggtctggctctgttgcccaggctggagtgcagtggcatgatctcagctccctgcaacctccccctcccggattcaagtgatcatcccacctcagtctcccaggtagctgagactacaggtgcacgccaccatgtccggctgatttttatatttttagtagagacagggttttgccatgttgcccaggctggtctcaaactcctgggctcaagcgacccttccaaggtggcctcccaaagtgttgggattacaggcatgagccaccgtgcctggcccttgtgatggctaattttctgtatcaacttgactaaactaagggatgcccagatacctggttacacatgatttctgggtgtgtttgtgaggttgtttcaggaagaggttagcatttgcactggtgggctgagcaggtgggcctccccagtgcagatgagcatcatcccaccctgtgagggcctgaatagaacagaaaggcccagggaagttggattgactcatcttctgcccacccccctaagctggggctttgatctcttcctgcccgtggtgctcctggttctcactggaatcagccttgtctctcagggtttccagtgataccataggactttcctgggtctccagcttgcaaatggcaagcagatcacgagacttctccatgactgaaagagtcagttccttataagaaatctatttctggccaggcgtggtgtctcatgcctgtaatcccagcactttgggaggccgaggcaggcggatcacctgagataaggtgtttgaaaccagcctggccaacatggtgaaaccccgtctctactaaaaatacaaaaattagctgggcgtggttgtgcacacctgtaatccgagctactcgggaggctgaggcgggagaatcgcttgaacctgggaggcagaggttgccatgagccaagattgcaccactgcactccaggctgggtgacagagcaagattctgtctcaaaaagaaaagaaatctctttctaggctgggtaggtagctcacgcctgtaaacccagcacttttagaggctgagacaggaggatcgcttgaggccaggagttcaagaccagcctgggcaacataaggagatccccgtctctatatatataaaaacaattttttttaaagaaaaaaagtttaaaaacaagaaatctctttctagtctttccatatatcctattgtttctgtttctctgcagaatcctaatgcagtctctatatgctcaaagagtacaaagatgttgataggtctttaaaaaatttttctttaatttattttttattttttgagacagggtctcactctgtcacccagggtgcagtgcagtggcacaatcaaggctcactgcagcctcaacctcctgggctcaagcagtcctcccccctgagcctcctgagtagctgggactacaggcacgtgccactgcgcctggctaagttttacattttttgcagcaacgggccctcaatatgttgcccaggttggtgttgaactcctaggctcaagtgatcctcctgcctcagcctcccaaagtgctaaggttacagatgtgagccaccgagcccagcccaagggtcaactttaattacgtgtctggctatttcttcataaacaaaatgaacaaccatgtgtgctgcttaagtgtctgccggctggggggatttcccttcaccactgcccttcaaggatgtcccacaaaggggctgcagtgctgtggctgtccacttccaggtgaagcgggagtgtcacccagaatcatcggtaaaccaggccaagcattttctttttttttttttttggttcatgctattctcctgcttcagcctctggagtagctgggactataggcacccgccatcacgcctggctaattttttgtatttttagtagagacggggtttcaccatgttagccaggatggtctcgatctccaggatggtctcgatcttctgacctcgtgatctgcccgcctgggcctcccaaagtgctgggattacaagtgtgagccaccgcgcccggcttttttttttttagatgaagtcttgctctgtcgcccaggctggagcgcagtggtgcgatcttggctcactgcaacctccgcctcccaagttcgagagattctcctgcctcaccctcctgagtagctgggattaccatgctaccatgtaccaccattcccagctaatttttgtactttcagtagagatggagtttctcagtgctggccaggctggtctcaaactcttgacctcaaatgatccgcccaccttggcctcccaaagtgctgagattacaggcgtgagccactgcgcccaggcaataattttttaaaaaatttgtagctgggcatagtggctcacgccaaggtgtgaggattgcttgaggccaggagttctagaccagcctaggcaacataatgagacacgaggccaggcgcggtggctcacgcctataatcccagcactttgggaggctgaggcgggtggatcatgaggtcaggagatcaagaccatcctggctaatatggtgaaaccccatttctactaaaaatacaaaaaattagccaggcgtggtggcggtgcctgtagtcgcagctactcaggaggctgaggcagcagaatggcctgaatccgggaggcggagcttgcagtgaaccaagatcacgccactgcactccagcctgggcaatagagtgagactccgcctcaaaaaaaaaaaaaaaaaaaaacaaccataatgagacaccaactctacaaaaataaataaataaataaaaattaaaaaaattagccaggtatgtaacaagcatctgtagtcctaggatgctgaggtgggaggatggcttgagcccaggagttggaggctgcagtgagctatgagcacaccactgcactctagcctgggcaacacagcaagaccctgtctcaaaaaaaacaaaaaaattggtagaataaatcagcaaaaccatctattcctgggattttctttgctggattctttaattactaactttacttgttgtaggtctatgtagcttttgtatttttttttctgagatggggtcttgctctgtagcccaggctggagtgcagtagtgtgatctcaggtcactgcaacctccacctcccaggcatactcaagcgatcctcctgcctcagcctactgtgaagctgagactacaggtatgcgccaccacacccagctattttgtgtatttttttgtagagatgggggtctcactatgttgcccaggcttgtctctaactcctgagctaaaagcaatctgcccgcttcggcctcccaaagtgctgggattacaggcatgagccaccgcacccagcagttttgtatttattcttgagtcagttttagtagtttttgtgtttctagaaaattttccatttcatttagcttattcagtatgtggtcacccaattgctcatactttttattttattttatttatttatttatttttatttttttgagatggagtctcgctctgtcgccaggctggagtgcagtggcacaatctcggctccctgcaacctccgtttcccgggttcaagcgattctcctggcttggcctcccaagtagctgggagtacaggcacacaccaccaggcccagctattttttttgtatttttagtagagacggggtttcaccatgttggccaggatagtctggatcacttgacctcgtgatccgcctgcctcggcctcccaaagtgctgggattccaggcgtgagccactgcgccaggcctcaactgcttatacttatactcttttctgtttctgtaaagccagtagtattgtcttccctttcattcctgattttagtaatctgagtctctttcctgttttccttggtcaatctagctaaagtttcatcaattttctttttttctttttttttgagatggagtttttgctcttggtgaccaggctggagtgcagtggcgcaatctccactcactgcaacctccacctcccaggttcaagcaattctgccttagcctcccaagtaactgggattacaggcatgcagcaccatgcctggctaattttttgtatttttagtagagacagggtttctccatgttggtcaggctggtctcaaaatcccgacctcaggggattcgccctcctcagcctcccaaagagctaggattacaggcgtgagccaccgcgcctggccgtcaattttcttttcttttttcttttttctttttttttgagatggagtcttactctgtcactcaggctggagtgccgtggcacgatattggctcaccgtaacctccatctcccgggttcaagtgattctcctgcctcagcctcccgagtagctgggattacaggtgcctgccaccacacccagctaatttttgtatatttagtagagacggggtttcaccatttgggccaggctggtcttgaactactgaccttgtgatccacccgccttggcctcccaaagtgctgagattacaggcgtgagccaccgcgcccggccaattttcttagtcttttcagataatgaacttttagttttattcattttctctattgcttttctttttctttttctgttttttttgtttgtttgtttgtttgagagagggtctcacttcatcgcacaggctgaagtgcagtcataggtcactgcagcctggacctcccaggctcaaggaatcctcctgtcttggcctcctgagtgtctggaaccacaggcgcccaccaccacacctgaatgatttatttttagtagagacgaggtcttgctatgttgcccaggttggtcttgaactgaggtcaagtgattctcccacttcagcctcccaaagtgccagtgtcaggcatcagccactgtgcccagccatgcattttattccctttcttatttttctctgttctaatcttcagtatttccttccctctttgggtttatttgctcgtcttctagtttcttaatgtaggaagcttaagttattgatttgagatcctctgtgttttgtttgctttttttttagacggagtcccattctgttgcccaggctggaatgcagtggtgagatctcagctcactgaaacctctgcctcctgggttcaagtgattctcctgcctcagcctccctagaagatgggattacaggtgtgcgccactacacccagctaatttttgtattttcagtagagatggggtttcaccatgttggccaggctggtctcgaactcctgacctcaagtgatctgcccgcctcggcctcccaaattgctgggattacaggcatgagccactgtgcccagctgagagcctctgttttgatgtagacatttatagctatgaatttccctctgagcactgcttttgctccatcccatagtttcggtattttatatttgaattgttattcattttaaagtactttctaatttcccttttaattttttctttaactccataatttagaaacatatttttaatcagtatgaatcacaaattcatatttgttaattttctaaatctccttctgttattaaattctattttcatgccactgtggtaagaaaatatattttgtatgatttcagtcttcttaaatgtattgatacttgtgacctgatatttgctgtattcaagaaaatgttccatgtgcctttggaaggaacatgtattctgtcattgttgggcagagaattctataaatgtctgttaggtctagttggataattgttttgatgaaattttctgtttccttgatgatcttctgtctagttattttatccatttttaaaagtggggtggctgggcacggtggctcatacctgtaatcctagcactttgggaggccaaggcgggtagatcacttgaagtcaggagattaagaccagcctggccaacacggtgaaaccccatctctactaaacatacaaaaaaattagccgggcatggtgtgtgtgcctgtaatcccagcttactctggaggctaaggtaggagaattgcttgaacctgggaggtggaggttgaagtgagttgagatcacaccactgtactccagcctgggcaacagagtgagactgtctcaaaaataaataaataaataataaaaataaaagtggggtataggccaggcacagtggctcatgcctgtaatcccagcactttgggaggctgaggtggacagatcacttgagcccagaaggtcgagaccagcctgggcaacatagcaagaccctttctctacaaaaaataaaaaaaaattaaccaggcgtggtggcacacacctgtagtctcagctactctggaggctgaggcagggagatcacttgagcctgggaggtcgaggttgcagtaggcagagattgcaacattgtgctccagcacccacaatagagtgagaccctgtctgtacaaaaaaaaaaaacaacactttttttttgagacagggtctcactctattgcccaggctagtctcaaactcctttactcaaacactcctcctcctaccttggcctcccaagctgctgggattataggcgtgatccacagtgaccagccttgatttctttttaaatccattctgacacactctgcattttaggtagagtttaatccatttacatttaatgtaattgctgatgagcacttatttctgccattttctgatgtttctttttcttttttttgagacggagtctcactctgtcacccaggctggagtgcagtggcgtgatctcggctcactgcaacctctgcctcccgggttcaagtgattctcgtgcctcagcctcccgagtagccaggattacgggtgtgtgctaccatgcctggctaatttttgtatttttcatagagatggggtttcaccacgttggctaggttagtctcaaactcctgacctcaagggatccacctgcccacctgcctcagcctctcaaagtgctgggattacaggtgtgaggcaccgcacctggcctcctatttttctatacatcttatgtcttttttgttcaattcctccactactgacttcttttttgttaaatagatgtggtttttttttttttttggtctttttctttaaatagatgtattctaatgtaccatcccaatgtcactttgcaattgtgagtgtatacaggaaataagaagagatctttagaaatggagtaggtgggtcaaagtgggagaggggcaattaaaactctgaaaggtgggctgggtgtggtggctcacgcctgtaatcccagcactttgggaggctgaggagggaggatcgcttgagcttaggagactgagaccagcctgagcaacatagtaagacactgtctctacaaataaacaatttaaaagatagctgtgtgtggtggtgtgtgcctgtagtccctgctactcatgaggctgaggtgggaggatcccttgagcccagaaggttgagactgcagtgagctgggtcacaccactgcaccccagtctgggtgacagagcaagaccttgtctaaaaataaattttaaaaactctgataggtgttactaaattgatctgaaatttgtctacaaattccactggatgtgttccaaagagagctttgcatgatattaaaattatctgttggtctgtcagtattcccccttaaactgtgccttcttggagagggagacctacttttattcattgtttatattcctacagtttagtgcatgctaggagcccccctgaaatgttatttttattttctgtagagatgggggttttgctgtttcctaggctggtcttgtactcctgacctcaagtaatcgtcccacctcaatcttccaaagagctgtgattataggtatgagccactatgtcttgtccctgaaaaagagtgaagaaggctgtggctcacacctgtaatcctagcactttgggaggcagaggcaggtggatcacccgaggtcaggagttcgagaccagcctggccaacatggtgaaaccccatttctcctaaaaatacaaaaaaattagccgggcatggtggcaggtgcctgtaatcccagctacttgggaggctgagacaggaaaattgcttgaacccaggaggtggaggttgcagtgagccaagattgtgccattgtactccagcctgggcgactgagtgtaactccgtctcagggaaaaaaaaaaaaatgtgaagaaggagaacagaacctctgtccctgtgatgataaacaggcaaattggaaataaggaaccacggcaaactgggaacttttagttcagctgtgcaagctaggagctctttcagctgacttatttaaagagcagcagaatcttgggacagaaagggaaatgagggtgttttccaagatactttaccagagaggaagcgaacgcctggggttaggaaattaaggcccataaaccagtagcttaccttggatttaaagtgtcagaaaactttttattgagcacctactgtatgaggcatcattctctccgtggggaagatcataatgaacaaggccaacaccctgtccttatggaactatgcattaagagagtgactggtagctcatttattcctctcatatatatatatatatatatatacacacagagagagagagatagagtgtatatatatatacacacacacactccctatctatatataatagagtgactagtagctcatttattcttatatatacagtgtgtatatatatgtatatacacgcactgtctatctctgtctctatatataatagagtgactagtagctcacttattcttatatatacagtgtgtatatatatgtatatacgcgcactctctctatatatataataaagtgactagtagctcatttattcctctcatatatacagtgagatatataatatacatcatatatatatatacatatatatatatgtatatatatatatatatatatatatatatatatatatatatatacactttttttttgagacggagtctcgctctgtcacccaggctggagtgcagtggtgcaatgttggctcactgcagcctccgcctcctgggttcaagcagttctcctgcctcagcctcccaagtagctaggattacaggcacgcaccatacccggctaatttttgtatttttagtagagacggggtttcaccacgttggccaggctggtctcgaactcctgaccttgggtgatccacctgcctctgcctcccaaagtgctgggattacaggtgtgagccacagccttcttcactctttttcagggacaagacatagtggctcatacctataatcacagctctttggaagattgaggtgggacgattacttgaggtcaggagtacaagaccagcctaggaaacagcaaaacccccatctctacaaaaaataaaaaataaaaataacatttcggggggggctcctagcatgcactaaactgtaggaatataaacaatgaataaaagtaggtctccctctccaagaaggcacagtttaagggggaatactgacagaccaacagataattttaatatcatgcaaagctctctttggaacacatccagtggaatttgtagacaaatttcagatcaatttagtaacacctatcagagtttttaaaatttatttttatacaaggtcttgctcttttggcctccgaaagtgctgggattacaggcgtgacacaccgcaccgggctccatatatatcagcagcaaccatatatcacatgagagtatgagaggaataaatgagctactagtcactctatttatattaacataaataaatatatattaatatacacacacacacataggatctctgtcacccaggctggagtgcagtggcacaatcatagctcaccgcagcctcaaactcctgagctcaagtgattctcttgcctctacctcctaaagtgctgggatttcaggaaagagccaccttgcccaggcttcctatgccaccttaatggcaacagaaaccctaggctcagagaggttaagtcacttgtataatttcacacagctggtaagtggtcaggtctagagtccaccacagaccatgtgcttccagttgttttgctgtatacgtccactaaataataatcatagcaaaaatagtaatggtataataacagtggcagaggcatcaggaacagcagcaaccatcatttccaagtgccaggcccagtacgtaagactatccccattcatttatttttacttatttttgagacagggtctcgctctgtcacccaggctggagtgcagtggtgcaatctcggcttactgcagcctcaacttcccagggtcaagcgatcctcccacctcagcctccctagtagctgggactacaggtgcgaaccaccacgcttagctaatttttttttttttttttgagacagagtctcactctgttgcccaggctggtgtgcagtggcacaatcttggctcactgcaacctccgcctcctgggttcaagcgattctcctgcctcagcctcctgagtagctgggactacaggctcgtgccaccacgcctggctaattttttgtatttttagtggagacggggtttcaccatgttagccaggatggtctcgatctcctgacgtcatgatccacccgcctcggcctcccaaagtgctgggattacaggcgtgagccaccgcgctcggcctaatttttatattttttgtagagatggagtctcactctgtctcccaggctggtctcgaactcctgagttcaagcagttctcccgcctcagcctctgagtgttgggattacaggtgtgaccaccgcgccgagccccactccctttttaaaccaatgcacagggagcatctactatgtgcgaggcaccctccattttacagatggggaaactgagttccaagcagcttttgccaggagtgggagcgcaccgtccctgcccagtctctccagttgggcgttccgagaccacctatgtagggtattcggctagcgctcaattaaaccgaaacaccgtcgcagcgaccacaggtgcagaccaccaagtccacaccgccagccgcccgggcgtccccaattagcagttggggcgggaccaagtcctcgagctgccgccgcagcggcggttgaaagccccaccccctgcgcgtgcgcggtgcgcgtcccgtcttcctgctgggcaccaggcgcccgcgaagagcgcgcgcgcttccgccggcgtcgggctcgcgcacgcgcacggcgacggcggcggtggcggcagttcctgctctaggctgcgagcggctggcggcttcgaggggagctgaggcgcggaggggctcggcggcagcggcggcggctcggcactgttacctctcggtccggctggcgccggggcgcgcggtttggtcctttccgggcgcgcgggggcgacagcggcagcgacccgaggcctgcggcctaggcctcagcgcggcggcgggctcgagtgcagcgcggaaccggcccgagggccctacccggaggcaccatgagcgtggaggcgtacgggcccagctcgcagactctcactttcctggacacggaggaggccgagctgcttggcgccgacacacagggctccgagttcgagttcaccgactttactcttcctagccagacgcagacgccccccggcggccccggcggcccgggcggtggcggcgcgggaggcccgggcggcgcgggcgcgggcgctgcggcgggacagctcgacgcgcaggtgagcggcacatggcggtgccggaagcccgggcccggcctcggcgcctgagacctgccccgaactcgcctcgggcccggcctgtgtttggccggagtcccccatcgcggccgggcctggggcgatctgccccgggtcccctactctggctcggcctgagcttacctgccccaggtcctgcaatctgcccgggcctggcctgatctgccccgggtcccccgctccggccgcgacctggctgagttccttcggcccccaactcctgggccgggcagacttgcctcgagtcctccacttcgttcgggaccgagctaacctgaccctgttcctttacgccagctgggtttgctccccctcctgggcccgggctgacctgccttgtgtcccacaatcagtctggcctggagtaacctgccccctgacttatctgagttcttccattccatccgggctagggtgacctgccctggtccctctttcgcaggtctcggtattctgcctcgagttctcctacgacctgggccgggtcttgctcaggccggagcttgagtgacttccctcagtccctttccgggagtatccagggtgacctgccctaatcctgtctctggcctggtccgggggtcctgcccggtctccccattggtgggtctggccgcctgtcccacctcccatctgtggtcgcagccatctgggcaccccacctttcacagtcacggagcgtaggttcgactttccccatgcataggggcgctggccagcggaaggttgaggcagagaagaatttttgcctcccatggaggagcacatattggctggctattaagatcattcaggaagcaggttgtattttgttttttcttgcatcgcctgttgctgaaaccgacctgttacataacttcacaactcttgccttggaaaagttgggtttgagttttgttcttccaataagacagcaataatggctttacataaacgagtctgccacgttggaaacttatttttaatgatgtggatgtttagagaaggttacttaggtattttaaatgggggcttgggttgggagaagtatcgggcatgcatttcctggtcctgggcgctgcttgcctggggtgggagaggggctgggggggtggcgcgtgttgcaccggggtcctggggaatgtcctcatcaccctctggatttcaggttgctttcaccttaggcttgctttgtgcctgacctctcgctcaggtttgttttcctgaatgctccgacaggaagaagctccgaggcttaccttggcacaggtgtcccttggcatatgctggtgtttcagaactgggggaaccactccttgctcatccagagtgagctcagaccctgtccttgcatggggggcttacgtggtagtcgattgagtcactctcgtgggtagaccacccacttgggctttcttttagcccctaatggaagcaaaaaacatttgactcattctaaccccatattccttaaaatagaaggtggggtgtgaggagaacaggtgtgcacgtatgggtgtttttttcagttttgtttacattttgcgaagggagggagggagagaggagagttctcctgaagaagggagtctgagctgcggaggccccacctccttgtagttttcatgccctgtagacctttctgcttccgcagctgtgaaatgggggtggcagttagatttttattccttttaaacataaaggaaacctagatccatgtgtgagtcgactgtatacgctgtctgtaatctgacgtccagcctgtcggggagactcggtaaagatctctgtggagcagtgagccatgagcgtgacagcgcggatcggggggttggctgggtgtgaaaggtaatcattttcttgtgaatccttttaactgtagcgagcataaaacagcaaacctggggcagcctttagttctgcttttgtttctggcattccgtttgggattaattgtggggcatgtccttctctttcagttgaaacaattgattttttttcctgcacctgaacacactgggctgtacaaaaggagagcattaaaacgctcccctggaggtaaacattgcagttgagctcactagaattctgacgacatcagagggtttgtcctgtgctacttgtaattgacccagatgccccacccacctgttacctgtaatttggatttgtttgtggggaatgggagtggtacccctttgcatcacaaggggaagaacggaatttgggggcaaggaagtctatgaatatcattcaagggaaagcggaagaaagttatctcttgtgtgaattgaaggcagtgtctgctaagatatttgggaagactttccctgtttgtcctcaggagttggccgtgtaaccagctgttaagttgggggctcctggaaactctcattctgcttttttaatttttattttactggggaagtggctatcagctgtcaagtgccctgcagtcacttttgcttagcggctttattgaaatagaattcacttgccacaacatacaatttacccatataaagtgtacagttcggcggcttttatttagtatattcagagttgtgcagccattaccacagtaaactttagaacatttttgtcaccccagagataaaccctgcaccccttagcccatccgtcctacctccacagcccctggcaaccactcacctgctttctgtctcaagatgtgcctgttctgggcatttcacatcaacggaatcatatcatatatggtgttttgtgtctggctcctttcactctgcgtgatgtgtgagaagtagctacaaggtgagcttcgtagctgttccctggccgagcattcaggaaaatgaacctgatcgaggttcatccacgctgtggtatgtgtcatcatttcattccttttttttttttgagacagagtctcgctctgttgcccaggctggggtgcagtggcgtgatcttggctcactgcaacctgtgcctcccaggttcaagcgattctcctgcctcagcctccccagtagctgggattacaggtgcacaccaccatgccccggctaatttttgtatttttagtagagacggggtttcaccatgttggccagatggtcttgatttcctgaccatgtggtccacttgcctcggcctcccaaagtgctgggattacaagcatgagccaccgcacctggccagcatttcattcctttttaaggctgagtaatattccatgggtggaatggtccagatggatggaccatgttttgtttatctcgtcatctgttgatggacatttgggttgtttccacctcttggcttttgtgaatagcactgctgtggccatgagtgtacaggtttctgcgtggatgtgtttatagacctgctgggccgcgtagtaaccttgggtttaatggtttcagtaactgcaagactgttttccagtgtgtagccactttccataccaaccctacctgaactggttttgcgcagttggttttcccttaatgtgtgttgaaagacagtgtgtccccaccgggatgggaaagtggcagcaggggtgactccctgcactcagagctggttcagataacactccttttcttgtttatgaaatgaaactgatatttatcaaagcccttgagatcctgggatgaaaagcgctgacacagtattgccaagtgtccttaagatacagggacagttttcgagcatctgaccttttcctgggcccttctctgctgccacttctcctgctcccaggacagtgaaggtaatttcagaagtcctttgcataatagctggtgttacaagccttttggtctgcctggttggaatatttcctcttgactgtagcttctgccctggatcctccaaacgggaactagagtgaaactcttaagagttggaaatactgctcagtattaagaaggaacaaactattgatacctgcaacaacatggatgtgtctcataataattacttttttgtatgtgtcattcatcatatgatttaattcataaaaaaattctagaaattgccagctagcctgcagcaatagaaagcagaccagtggtggctggacagaaaggtgggaaaggggaggcaggtgacaaagggcacaggaaacttgggggtaatggacgtttttattatcgtgattgtagtgatagttttatgggtgtttaagtacattgatgtatgtcagtttctaaaatggcacactaaacatttgcagcttatggtatgtcagttatgcctcaatgaaactggaaagaaaagtcagggagataccactatccacccatttttttttttttttttttttggagacggagtctcgctctgttgcctaggctggagtgcagtggcacaatcttggctcactgcaacctccacctcctgggttcaagcgattctcctgccctagcctctcgagtagctgggactacaggtgtgtgctaccatgcccggctaattttttgtatttttatagaggcagggtttcaccatgttagtcaggatggtcttgatctcctgacctcgtgttccgccctcctctacctcctaaagtgctgggattacagccgtgagccactgcgcccagcctgccatactttttttaaaaggctgaaagtgctacttgggttttttgtttttgttttaaggcaaagtctcattctgtcacccaggctgtagtgcagtggcgttatcatgggtcactgcagcctcgacctcctgggctcaagcgatccttccacctcagcctcccaagtagctgggactacaggtgtgtgccaccacgtctggctgatttttctttttttgtagagatggggttttgccatgttacccaggctggtcttgaactcctgggctcaagagatcctctcacctcaggcctcccaagtgttggaattacagagtgagccattgagcctggcaaaagtgctgcctggaactctcatgccatacacctacctgtgacctagcagagatgaaggtgtgtgtacgcagggctgcgccaaatgctgacagcatctcttcatgagaaccccaaaccggaagcagccccagtggccatcagcagatgaatgggtaaacaaagcagtgtgtacatccagtgggaaaaatgtgtgcctattggtttgagttgcttttcttagctcacctgaaagtatgaggtctgtgggtaggtacagaccttttaggcagcaacacgcatgtttttgtgcaggtgctctgggtgaccttgtagatagatgctgcttggtactggtcccactttgttccttcatcctcaggtcaggtctgcactgcctgttccgtctccactcctggtagcctgtgggagtcacagctgaatagtcatctcgtactgggattttactctgagtgcatgagttgtttccctaggaaaaacatgctgtctttctggatcgtaagggacaactagctaaagctcctagccgacctgtcgtccagccctcactctcctcctgccagacttctctgtattgcctccacttctctgagtgtgtaaacctgggctcacttttccttttgaagtggtaaaatactcaggatagaaagttgctactttgtcttcaaagccattgtcctgacctatccttgactgtccaggtgaacacaccatcttctgctgagccctgagattatgaccaaggcggggtgagttccatacagtcttgggttccgaaaagtggtgagtttaaaatctgcacatgtagctgggcacgatggcccatgcctgtaatcccagtactttgggaggctgaggcaggcagatcatttgagctcaggagtttgagaccagcctgggcaaaatgtccatgatcgcaccactgcactccagcctgggtgacagagtgagaccttgtcttaataaaaagaagaaaatccaggccgggcttggtggctcacgcctgtaatctcagcactttgagaggcagaggcaggtgaatcaccggaggtcaggagttccagaccagcttgaccaacatggagaaatcctgtctctactaaaaatacaaaattagctgggtatagtggcacatgcctgtaatcccagttacttgggaggctgaggcaggagaatcgcttgaacccgggaggtggaggttgcggtgagctgagattgtgccattgcactccagcctgggcaacaagagcaaaactccatcttaaaaaaaaaaaatgctcatgacttcattttggctttttgaatcctctggtagcccaggtgtggttttagggtgccagaacattggagataagatgccgtttacctggaggagtgttggcaagtgtttggtcagcacttaccccttagtagacttactgagtgtgttttcaaattgttaggagtttcccagtgattatgtgaaagtgacctgagctgacactttacagttagtggtgaatacacgaaacaatttctatttttatcacaattaattacccggattcaggatgacggggtgggggattatgactaatactataccaggactaactaaaaaaagagttccctctcagcctagctaccaccaccacaaaagcttaccaccatcagctaccaccacatttctctcattgcttgattgaagtctgatgacctaccagggaacccccttcttttctttttagacggagtctcgcactgtcgcccaggctggagtgcagtggcgcgatcttggctcactacaacctctgcctcccgggtttaagtgattttcctgcctcagcctcccgagtagctgggattacaggtgcgcaccaccatgcccaactaatttttttgtatttttagtagagacggggtttcaccatgttggccaggctggtctggagctcctgacctcaggtgatctgcccaccttggccttccaaggtgctgagattacaggcatgagccaccacacctggcccctttaagtatagaacttagtgctgttttagtaaatttacggaattgggcagccaccacagcagtgccttgctgtctctgatttctctttcgctcctttccgctccctccccaccaccccttgtcagaccctgtgctcatgcccaaggtcacccgttagggaggtgtgtccaccgcctcagactgagccctgccctggggaggtcagaaacatggccaagccctggccccatgctcccccgcctttaagccccgtgtctgttaacttttgcaccctctgcgagctgctgggcaacctcttcagcctggccctggacttcagccatcccctgctgttttcttacttcctggccttgctgtgcttgtgggactgagggcagtgaggccagcagagggagagtgaagcctttgacccccgcggttgcactgttagaagacagcacatgccgcctggccagggtgctgtgagggccccaggagtaggagtgggctcccctgctaagggaaagcctgtgggaatggcgcctctggagttgttcagaagctgtacctgccaggcagaggggtgggcacagcactttgcctagaaggagggagggtggatgtggggccagtggggccagggcaggggctgggctgtgtcctggagcctttaggagctgctggggtgccttgaccaaggctgggaggagggctctgagatggcagtggcgggggttaggggaggggctgtggtgttggaggttgggcattgtggcccaggttggaccccgaatggatggaggggccacagggcagtggagacggaggacaccgggatcagggctgtgtgtgtacatgtgtgtatgcatgagtaagtgtgtaagtgtgtgtgcctgtgggaactgccagggtaccggctgccccctcccagtcctcacagggagccacagacttaaaaagcagctccagctcctgcctgtggtctcatcagggtccataattccccaggctgagccggggctctctccgctggggaggcaccgtcctgagggccttgtgagagggagaggcctccccagagcggctgcaaggaagctaaagggcacatgctgggcagcagctcacaactgaggggcagtttgtgcttgtcatggtggtgagagtgctttcatggtggtcgggatagtctagcttggcagagaagggccgtgacacccagctgtgctctgtggcattcagggccgaggggcctggctggaggggctggtgggaggagtgggtccgggccctggcaccagtgctgttcggggctccggagggttcatggccttgagctctccttgctggagcacatacctatgagagcaaagttctgctttctctgatacatggagggctgctgggtcctggagtctggtggctggcagcaggtccttgtgcctttttctgtgttggtcgaatagcagcttaagagccgggtaacccagccgggcttctcaggtcccgtgggcctttgccaggatggtgtctagatgtgtaaaggtggctcgttgggctctagagagcccttgtgacagtgagcatggcatcttcctgaagcatcagctccttgcagagcgagtgcaggctcctggcggccctgggagagggggttgcagatcccaggcagaggtgtttggtcagagctgcgctgcctgcaccgtcctcacctctttttcagtacggggatccatgcgcatagcttgcagccctgctgcatcctccgtgtagaaacgtctacgatgaattctctaacatacaagagctggtgagccctgtgcctccgtctccctgatgagacagttgtgaaggttttcttctccctgttttctttttttttcttcactggtgtgtgtttttaaagcaagtcttttgtgtcctttcacctttgtgtctgaggtggagccctgtgaattggcgatactcagccattttgacctgcagtatgtagtatgcatttctagaagcagaaaagggcgcctgtcctgaatagctgcagcgccgttatcacacaagcagcgtcaacaatggcttttcacgattgtccgatatgtagggacagttggcctctctccacagcagattctttactgggatcctggaggtccgctgttgagatgatggctgtctctgggccctgcgttccgagcggcctctcccgctgcttttcatctcgccaagctgcagtctggcctgggttgttgtcctgtgaggtgtgcaccttctggactgaacccctcattgtcacacttcagcttcttgctgaaggtgtggagtggatttcatctcaggctgtgggctccagggagagtggctgatccccgggctgggaaggcaggggcggcctgaggtgagctggggatgccttgcacactcggcccgttgaaatgaacctcacgcggactctagcacacctggctggaacaagggtctgccggtccacacaggtgccattggtgagaggggaggcgagaggccctttctctttgggaagaacgaatgtgagcctaggcaacatattgaaaaattaaaaaactttctaggcattgtgcacacctgtagtctcagctacttgggacgctgaggcaagaggatctcttttaagttcaggagtttgaggatgcagtgagctatgattctaccactgcactccagcctgggtggcagagcaagaccctgtctcaaaaaaataaaggaatggagagcctggggaccgctgtgtcgggtggtgggactatgtgaaagatggtcaactcctagcagtttcacgtggttcaaactaatagattaaaggtggctaaagagacatcacaaatcacgtgcagtcattaactgggacttggattcttaaaaacctgtaaaagacgttatgaagacattggggtgatgggtgaatgtgtattaaccaacagtgtggcaggctgggtgcgctcatgagccagctgttttgtggggatgtggagaaagccctcccctggggccggccactctgaaatgggtcaggaagagataagtgtgtgagagcaaggggagtcggagtgcagggggatgtgatggagagtgtccagctggaggggtgtgggggtcggatttctgtagctttggaatttttcaaaataagaggaaatatcagggcagaatccttccagtttgggggccagacctcctggcaaccctctgccttgagagggctcagagaccctgcagcttcttggcagtcatcactctgagggtgtggtgaacttcctattccctcccctttttttcctttacaatttttttaattaaaaaaaatttgggggggtgctgggtgcagtggctcacacctgtaatcccagcattttgggaggccaaggtgggtggatcacctgaggttgggagttcgagaccagccagaccaacatggagaaaccctgtctctactaaaaataggcgtggtggcgcatgcctgtaatcccagctacttgggaggctgaggcaggagaatcgcttgaacccgggaggcagaggttgcggtgagccgagatcgcgccattgcactccagcgtaggcaacgagagtgaaactccgtctcaaaaaaaaaaaaaatttaaatagagatggggcctcactatcttgcccaggctattctcaaaccctgggctcaagatcctcctgccttggcctcccagagtgctgggattacaggtatgagccatcacgcctggcctcctgccctctcttttatttaagccttggaattagagaatcaggaatgagctgctttgccttttgagcttggcctttagccaacaatgttgagggcctcctggggtgcaggctccatctaggtgctgggctcatggcagggagcaggacagacaatgccccacgggggccttgaggtggggtcagaggatgcctgcctgagaggcaccctgtggacctcaccctgaggctgagggaacagcaggtgcaaggcctgggtgctggcaaatgcagacagtggtgcaaatgttggagtagatgtctgcggcctgagagtttatgatggcacatttggggggatttttgagtttttgaatttctgtggttttcgtctgtgggaatgaagtgactttctttgttttttttttttttttttgagacagagtcttgctctgtgactcaggctggagtgcagtggtgtgatctcggctcactgcaacctccgcctcctgggttcaagcgattctcctgcacggggattacaggtgcgcatcaccatgcccagctaatcttttgtatttttagtagagatggggttttgccatgttggccaggcttgtgtgtgtgtgtgtgtgtgtgtgtgtgtgtgtgttgttgttaagagagacagggtcttggtctgttgctcaggctaaagttcagtggtaccatcatagctcacagcggccttgacctgctggggtcaagcaatcctccggcctcaacctcctgattagctgggactacaagtgtgcgccaccacacctggctcgtttgtgtatttttttgtggagacaggatcttggctgtgttgcccaggctggtcttgagaactcccgggctcaagcgatcctcccaaagtgttgggatgacaggtgtgagccaccattcctagccttgaagtgacctactgttgtgctgccctgatgcacggtctgagttctggagcatgtctctgggcagaaagcccctgtacagctcttagatggacttccaggatgtggttttagtcgtagctaggttcacatccagaactaaaggagttagagactccagctctggggcctcgtgtatgactaggaagtgggaattctaggatacgtctttaaatactgtgtccagagcagaggtgatgggaggagctgctttttttgggggccgggggggggtttgggtttttcttttttctttttttttttgagatggagttttgctcttgttgcccaaggtggagcgtgcagtggcacggtctcagctcactgcaacctgcgcctcctgggttcaagcaattctcctgtctcagcctcccaagtagctgagattacaggcacgtgccaccacgtccagctaattttttttttttttgcctttttagtaaaaacgaggtttcaccatgttggccaggctggtctcgaactcctgacctcaggtgatccgccctgccgaggagctgcttcttggtgaatgcctgggatgggtacagggaggccttgcccctccagagcctccctggtgaggggataagttgacagcctcaaaggactttattggagtggcagctctgtgccagctgaagatgatgaccctcttgtccttcacccatcatgtcccctggcgtgggctgtggaacttctctgtgccaggcactgtcccctactgctgttttacctcatttcatgatagttcctagggtcaaatatatttttgaaattaatgttttatcttgaaacttttcagagagtgaagggagaagttaacccagaagtcagcttgtgttgtgaccagatcactgcagggcagcattgggcccagtgtgcatctgtgcgtgcaggtagcacgtgcccatgcaccccagccaggcgggctggaggggcctctgtggggtgctgctccccatgagcacctgtccctaggctcgcacaggtgctgcatcacacagcaagggcattaggccgaggggctgtctggggtgctgggactggcagtgggagatttggtgccgtccctaggggagctcccatcactcctccctggcccttaattttgtgccaccttgtgttctgccatgacacagtgctcccgctgcctgaccccgtggtggggttaggtggcctatgggggccatgccagggactgttggccatgtcatttgaggtgctggtacttgggagtggcatgaggagccccagtggctgtgtggtctccttgcaagtgtcctgtgcagttgtggcctgatgacttagagccatgcgctgtctgcctttgctgaacatagaagaggcgccttcagtgagggtgtggcctcggttgccaagggtatctcagtgttcagtttctacttcatcctcaggagagggctgccttgaagggatggggagggtgaggtggcagtggatgtggccagtgacatttccacatctgcatgggtggcagcttcgtagtgtttgatgagccttacactgtggtgggtctggcatcatgaagctgtcctcagggcacactgctgtcagtctgtaaaagtcaccctgctccttgtggtcctcagtcatgggaaagaagcatcttcctaagcatcctggttgtgggcatggacatggctctgtggctaggcgggggttagaccagctgtgtgggggaccggggggtgtagaaggccaccagtggcccttttttggccaggtaggtttgctagagaagagtgaaatccagtcagaacaagggaaactgtctcaaagcagagatgaggccagggtgtcacaccagagtcatcgaggctggttcttctgcactgagtcctggaagctgcagcctcactcaggtgacactgcgttctgctgcaggttgggcccgaaggcatcctgcagaacggggctgtggacgacagtgtagccaagaccagccagttgttggctgagttgaacttcgaggaagatgaagaagacacctattacacgaaggacctccccatacacgcctgcaggtgagctgagctcagctgggcctgggcatgtgctggacaggtgggtgcctctggcatgggcctgggacactcacctcccaggtacagggtggcgcccttgtgctgtgactctgggtggcggtgtcctcgggagtaaggaaattgctcaggccatgtgcacagccaaggcctgttaccggtcaggaggtgggctcagcaacctccgacaccctgaattcaccagctggtgggaaaagttttccttcctttggcctcctcagaccctgggggcattgcctggtacctgcgcactcactcatagaaagaatttgtcatggcattgggtgagcatctggggtgggagggtgagtggagcagctgagataccctcacaaagcagttgctgcagggttctggggcatccctgcctcccgctgccttggccgtgcctggagaattggatgtgaagacagtagttagtggatagacctgcatgttgacaaatttagaattctcatctcgagtgggatcgtcccttgttgaggcttatttctgtatttttgtgacacacaagtgaggaaatgtagattagaagaggggagaaggttttggccaggcacggtggctcactcctgtaatcccagcactttgggaggccgaggtgggcagatcacgaggtcaggagatcgagaccatcctggctaacacggtgaaaccctgtctccactaaaaatacaaaaaattagccaagcatggtggcgggcgcctgtagtcccagctagctacttgggaggctgaggcaggagaatgacatgaacccgggaggcggaggttgtagtgagccgagatcgcaccactgcactccagcctgagcgacagtcacggcaggtttgggcctgagccctgcctctgtctgtgggcacccacttggggccctccctgcagctccttgcccgcgtgctgcccagcgctccgggactgaggctgctcttcgctaggcttggtgggcaggcactctttcctgcatctcagctcttcactcattctcatttacagatgttttcgtgtatgtaattgtgttctcttaacacacagagatggccataagtcctggtgcagctctggggagctagtatttttgggtttggtatgtggattttcagaaaaccacagccagtggtggggtgaggctctcccgaggctcctcgcttgggcttcggggcctgagcttcagggcgctgctgctgcagggtctgtgcccagctccctgggagcacagtgccctctgctggagcccagagttcaccatgaccactgggtctgaggctggattcctgaatttcaggccaaagaacggggactagaatggccctggaggagtgaggcctccttccagcaggactctccttggaggtggctttgctccttatcccctcggagcttctgccacataccccttccctgcattcttggatttgagaagccctggttaactggtttgatttggttactgggattgttggggttgagtatgtgtttaatgaagaacttaaaaatgttgtcagaggaaagaatttcacatcttgccaaatgaaaaccagagagcaagcttccagctgtaactgtcgctgttttgattttttagttactgtggaatacacgatcctgcctgcgtggtttactgtaataccagcaagaagtggttctgcaacggacgtggaaatacttctggcaggtagataatcagaccatgcatgtgtgtttaatcagtgctgtgctcagatttgtgtgtaaattatggaaatgttgaagcaaagcgtaatataaaatcacgctaacaaacctgggttttttcctcctctgtgactggtttaacttgaaacagatggtggtgtgtgaatgccttaatgtatttacccttgatttattctctgtggctctttttattatgcaagtagggttggcttaattctccttcccagtttttatttcgatttttctgcaagatgagctcttggcacacccgctgatcttcattaacgggaggatgttcccaaggcagtaacgggcatccaggggcgctggttcctgagcaagcttgctctggcctgagctcatcggagctgtccggaggctaattcaggccagatcctgaatcatcggcttcaattaagttcacttgaccgtcggcgctgggcttgccttcctgatgttgatcagctgcagctggactgtgtcgcttgttctgtgtttgggacaggacagtgttctcccagtgcccaaattccaaggggggagttcgatggtcttgcccgagtggtgggactctcgtcctggtgggtcccgtgctagcggctccccttcccctccaggttgctgtgtacaggtcactccactgctggagaggatggagcagagcctgggaggcagagctccgaggtgctagcaaggaagtgtggggtctttttctgaggttcacgttctggagaaagaaaatgaccaaagcccggaggcaggcttacttgtgctgacacaagcccctcctgtgcctttgacagctgtgggtctcggagggttacagatggagcagtcagatctcgtggcatctctgagttagtaacttgaaatatggtgttatgagcaaggccagaaaggggctgctgtttttaaaagattttaaagaagggtatcttctggataaccaaaagacattcttgtcccattttcagaatcttctgggtaatttaagtgttgctatgtttgcatttagttcctcttgttcaggaaaagcaactaaataaaacttctcttagctggcaaccccagcttccggtcagcatagccaagaacagggaagtgagcaaaagggcctctgagaaacaacaggcttgagccaagcaccactgagcattctgtgcgaggcccaggggaaggtgaggaagcagccgctggcccttagggatcttggctgtgacagggtgaggatgcatgagaagacacggagacagctgattctgcccacgtggccggcagggctccagagtggagtcgggctttggagatgctcagagtggccatggctggttagagaatcctgggcctcgtggcagggagaagggttagaagattagctgagctgaagcttttggcaagaatggttttccagaggggaagagagagggcgcggtgaggaaggctgggaggccctgcaggcgtgttcagagctgctggagacaccggaagagcccaaaggcagagcagctgggcatccttgttagatacggcagataggtgctggagggtggctggcttggcacagggcagggttcagcccagaccgcggtttaggtgagcagtgtcctggccacgtcgcagcaaggaaggagccgagccagccagggcttcacacacagccctgggcttctgtagaaccgcccccgcctctgctcaacctttttgctgctttttgcgggggtttccagtcgcctgcttatcagatttcccggcctgcagcaaagcaggagggactgttgctcctggaagtaggcacagggcctctgaggagtgatttcagaagaagccacagaagatggtggcgggggttgaccttggaaagaaggggctggggccttgtgggaaatgtctctgaccccacagcagccctgggccaacaatgggttaaattaggcctgataagttggatttaagaaagcaggatttttaaaaaaggcaggaactatgtgaaccgtgttaaggaagttttccttaaagtggttcaagttgggattgatttttgtgctcagtggggagctagtttgggggagggctggcccccagagatgccagatggatgaggtgtgactgcctctgctaatggaccgtgaacggtaccggaacttttaacaggggcccgaaaattggaagtggtgaaaagccaaattttgggtgttaaccgtttatcatttcctggtttcagccacattgtaaatcaccttgtgagggcaaaatgcaaagaggtgaccctgcacaaggacgggcccctgggggagacagtcctggagtgctacaactgcggctgtcgcaacgtcttcctcctcggcttcatcccggccaaagctgactcagtggtggtgctgctgtgcaggtgagtggtccccagatgtctcctgggggtgacctttaagctccagccgtctcctcacaagccttggcccagcccagcccagccgtggctctaactccagggagttgtcctccaaagatggtttttgctgaagggtgaggcatgagagcgtttaggcgctgaggcttgttaaggagtcggcagtgccgtgtaactcttttggggcgttctggctaagtcataaaaacaattctgtaaaaacaaagtctgttctgagttttaagagttcagagctcaagtgcacagggagatgcgatttattactaacagtttgaaggtaatgtgatcacataataaaatgcagggcatgcccctttgggtgaaaggtcagcatgggagggggccctccctgctccggggcttcagggacgggagctggtcctcacggccccctcccgctctgcaggcagccctgtgccagccagagcagcctcaaggacatcaactgggacagctcgcagtggcagccgctgatccaggaccgctgcttcctgtcctggctggtcaagatcccctccgagcaggagcagctgcgggcacgccagatcacggcacagcagatcaacaagctggaggagctgtggaaggtggggctgcccagcgggccgacccgtgccttcgtgtggtttctggttgcggggaggggagtgtcttcagagacggcttgacccagtgagaccgctggagattctctgaaaggaattcaggcagacctctgccacctctacgtggaatgacctcagggcaccttggtcaccttccatccaggcagccttacctgaccgagaagatcctggccttggggaaaggaaagctctggctgctggaatttttcttgtcttgccggggtgaggatgggtggtgggaggggaagaatggggctggctgtgggcagacttgtcctgcagagcctgaacctgcccagacaggtgggctgcgagaatgtcctggggaaataggttggtgtcgaggtcggcacagtcagctgagacagaggggagaggagagggtgccgggtcaagtagtgggtgcctggccctccttccacagacagccctcacttttccccacggaagcctttctgtgcttccagctgtttaggattttgtgataaagtagttctaataactaggctagaagttttcatttgcctcccattcagtcagaaatctcacataggaaatgaagtgcaagttaaaatatttttttaagcattgttcagccgggtacctttccacttggattttccggttgccagatgatttcatgattcccgtttatatctgaacagcccagaaaatgtcctgtccccaccagcatggcactcactgagggagctggcccccaggggaagagctgcgggcccatgttggtctggctcagggttagcagacgtgggagacaggcctcccgggctgtggacacagcgagagaaaccggtggtctttgtggcagcctgcgaggcgggttagctgctctcgttcacaagctgggcatacttggaggaagcagctggctctgaaggtgccctctgctgtggacagtgtgtcaggctggtgcctggggctttgtaggcaggttcacccaagtaccggaaccccgctggggtgcggagcagcagctgaggcccaggcatgggccaggccggtgtgcagctccctgtgtggcatggagttcccgttcccagggttctccttgcaggtggggctgcgccagaacccctccatgccacccaccgtggcccattctgagaagcggcatgtgtgctccatccctctggtgcctctgcgccctcgttcatttgcatgtagggaaaaacaggacgagtgtggcgcggtgttgttgtcttctaggaaaacccttctgccacgctggaggacctggagaagccgggggtggacgaggagccgcagcatgtcctcctgcggtacgaggacgcctaccagtaccagaacatattcgggcccctggtcaagctggaggccgactacgacaagaagctgaaggagtcccaggtgatgtgtgcgagagggcttggcctggggtgggctctggctctcacagctctctcctcaggcttccagagggaggttttctctccaggctgtgggagctgatgtgggctgcagccgcgacacctgagagttggaacttgcggatccgggcctggcagcccggtggtctgagcccccgccctcagatctgacatcagcctcagtgttttctgtttaaatccaacacatctttcccagtggggtccacagctttgcccacagttgcgagagttagactcgggcgtgatccctgtgaagaccacatttaggcaacgggagccctggagcgctgacctcccctccctccctcccctcctctttctgtccctccctcccctcctctttctgtccctccctcccctcctctctctcttcctccctcccacagcagctgctccctggccacggaggcctctggtgtgcggtgaagcctccagacgggattggcctgtgtgtgttccggggactcctaatggcttctctttcagatgtgcccttggtggcatttggggctgcaggtgccactcacggcgcctgctctcacggcagaggcttgctgtagggcccgcctcatggggcctcgggcatgtggaggccaggcccgggcctgtgctggaggctaaccggggctcttgtttttcatgtgctcagactcaagataacatcactgtcaggtgggacctgggccttaacaagaagagaatcgcctacttcactttgcccaagactgactctggtaatgaggatttagtcataatttggttaagaggtgattttaagttttaaaatatttgtgaccataagtagcataaattcctagttccacccttgtaaagtgccccttaatttgaactctccctggtggaagcgacggcgtgggttaaaatggccacctctctcacttttttacctcaagacatgcggctcatgcagggggatgagatatgcctgcggtacaaaggggaccttgcgcccctgtggaaagggatcggccacgtcatcaaggtccctgatagtatccttcatgtgaagagggtgtggccggctggtgggagaggaaagtgggggcatcaggtggaggccactgtggatttgatgctcactgctgggccagcatctcatgctctgtggtgggtgctggttggcatcgccctccactgctcttaggagaatcacagggccttcaccttcaggggacagctggttgtatggttgcttcccctctgcccgaatggtgatgttggtgatgccacttgtgtggcgcgtccctgggctgactctggaagttaatgtatgccgcttgtgtggcacgtccctggactgactctggaggttaatgtggctgcaggagcgccttacctggacgctgactctgcacacggaggttccagaagccagtggtcacatgcagaccctctgagcacacacttgctcccaggccatgtttgggaatgtgcagtgacctcatggtgatgcagcctgccggccagagtggggcagctgtaaggcacaggtgcagtcagaggcttgggtggggaggagtcctgggagaagacaccgcgggtcagactcaggctgcctcttggtgactggccaatgctgctggggcctgaccattcagcggtggcctccacaggggtagggagagttgtctcccacacccaccctgggcctgacaagctcatcctgaacacgtgagaccggttttggggctcggggtcgagggaagggtgttgcctaccggccacagcctcctggagggcagtttgcttgtgtatgtggagccttttgcttggccgtactgggaggggtgttgtttctgtggaactgtgagaagagctgctgtggccaaagctgggttctgcgagctctgcctgcccctgctggccacatgtgcaggagctcccggtgaggtcctggggcccaggatgtggctgctccctgctggtgagcgctgctggcttcgctgccgccctctgcgtctctgaaaggggcctagatgggtggctgggagtggcaaggaggaactccaggctggctgggggtgggacaccggctcatggtgaggtagagtctttcttcaaggatgctgtccttctggtctctggtctggtgttggctgcacgtttttagcgtttggtgcagagccagcggtgtcttaagtaactaaattttaaaaacgctgtttaaagagcgtgtaccaagggtggcccagaaaggtcagcccggcttttgacaaggatgcaaacttaactcagcacacagattatggcgatgagatcgccattgagctgcggagcagcgtgggtgcacctgtggaggtgactcacaacttccaggtggattttgtgtggaagtcgacctcctttgacaggtacgtcttctcccatcactgccccctgttccctggttgccacctgtggcatctttatgagccctccccgtcactgtggagtggggttccccacccagctctgcaaactcaggatgtcggagaggcggccacagctgtgcgtgtcgccaaccccaaaccctcctcacaggatgcagagcgcattgaaaacgtttgccgtggatgagacctcggtgtctggctacatctaccacaagctgttgggccacgaggtggaggacgtaatcatcaagtgccagctgcccaagcgcttcacggcgcagggcctccccgacctcaaccactcccaggtgcgcgccgtcctcagcgcgcggggcctcgcccatgggccgggacgcaagcggaggctgcccctaacggccgcttgtattgaaggtttatgccgtgaagactgtgctgcaaagaccactgagcctgatccagggcccgccaggcacggggaagacggtgacgtcggccaccatcgtctaccacctggcccggcaaggcaacgggtagggctgacacggcccttgcgggcaagacccgggagggctttagggtggccagatggaaggcctggtgctgggagccttgggctctgtcacaccgaagagagcacgtggcgggtagtgtcgccatggtgcctaccgctctctatgtgacattattcgtgtcagctccaaccttaggattgcattttagtaaccaggtctgctactggtttagaaaactgggggcagggggggcatggctgcagcagcgtgagttccgtgtgcggcactttatagtgtggcgggatggtgcaagttccagccttggcattgcttgcggtgggtagagctgtgaagcctgggctgtctggatctgagctccttcggcatcgtgtcattactgcctgttaaaaatgtcaggagtttaaggccagcctgaacagggtgagacgtctctacaaaaaaaaaattcagaaattagctgggggtagtggcgtgcacctgtggtcccagctactcaggaggctgaggtgggaggattgcttgagcccaggatgttgaggctgcaattagctgagatcacaccactgcactccagcctgggcaacagagcaagaccctgtctcaaaaaacagagtcttggcttactacgttcaccgagcttcctctgggtaagcactgagctgccccaatggtgttgcaggccggtgctggtgtgtgctccgagcaacatcgccgtggaccagctaacggagaagatccaccagacggggctaaaggtcgtgcgcctctgcgccaagagccgtgaggccatcgactccccggtgtcttttctggccctgcacaaccagatcaggaacatggacaggtgtgtgtcgagtccatccctcccagttggtccctgagcttctgcgggtgacatgtacagaactcaggcaccctgctgacctgcatgtgcttccagcatgcctgagctgcagaagctgcagcagctgaaagacgagactggggagctgtcgtctgccgacgagaagcggtaccgggccttgaagcgcaccgcagagagagagctgctgatggtgagtgcccctcctgcctgcaaaagggcctgtgggctggcggcctgatggtttttgtttgggccaaagcacctatttgaattgttgctttgcttctggaaagagaacttagatgctctctacttggcctctctgcgctcagttgtacagtaaattagggacatctcgctgcctggaacacggtcttctagggagtctccactccctgccagcctccactgggatccggcagtggatctagaacactcctgctctttcataaccaaccagcctgaactggaatcagcctgagtgcaggttccagcagctcagcactgccccttggaggctgtcgtgaggcgcagagctcttggtgtggagaggttgccttctgtgaaacatgaccgtttaaggatcttaaaagtttgtaatcaccacagcctggaccatgtatcttgtctgggagggacagcttgttttttatagtgtcagggagggtgagaaacaggagagcttctgtgttctgtcccacctgccctccggggtctggtggcgtttacagtgcaggtgccctgatgcctctgcacccttccccagaacgcagatgtcatctgctgcacatgtgtgggcgccggtgacccgaggctggccaagatgcagttccgctccattttaatcgacgaaagcacccaggccaccgagccggagtgcatggttcccgtggtcctcggggccaagcaggtgggctgcctcccctgccctcctgtgtgaaaactcgtgtgtgtgattcttggtgtttgtcttttaaaacaccttgtattgacgtaggatgcccagcagagtgtgcgcacactgggggctccctgaggggtttatagagggtgggttctgccagctgcacgtccagtgtgcgtggtgagcaatgcccctgtggccaggtggtgtcctgtgcatcctggggcccctacttccttgctagtgtgtgttgaggctgattcacacctgagcttcttgacttgtgggggcccctgttcctacagctgatccttgtaggcgaccactgccagctgggcccagtggtgatgtgcaagaaggcggccaaggccgggctgtcacagtcgctcttcgagcgcctggtggtgctgggcatccggcccatccgcctgcaggtccagtaccggatgcaccctgcactcagcgccttcccatccaacatcttctacgagggctccctccagaatggtgtcactgcaggtaacggggctctgcccagggcaggggcttctacagagaagcggcatcaagggaatgtggactggggagaaggaactggcccatcagcttcccctgagcggcttcacatagccactgcttgaggtcagggcactttgtgcccaaggtcttgatggtatggtcttggatcaagtggtgtctctggggcatgtggggagcctgtgtcctctgtaaaactcagtcattgcctgagaattcatccaagcctcatgtggcagcatgcacagcagccaggacaggctgttaggggagctgagcccgggccttaacgtgggctgtgcattcagtgcttcatgaagaacagctgttctcagggcctgggcccctggggcccgcaagaccgtgtccggcttccctggataacacagaggcctcacctgccctttttcactctgctgacgctcacactgctggtgaccccctggtgcttctgcaagagtcagcccagagcagccagactgtgcccggatcacagtaagaaacgccctggatgaggaagtgaacagtacatcttactaagcctcgagtgtttcactgtgaccagataaaatttctcgtgacacctttgggtatgccggcgcttgaaggaagtccttgtggacacaccctgggtattcaccccaaggtgttgggcagactttttccaaaaatgatcgaacctgtcgcttcatggagaactagtggcaacatctgttacagtagtaaaattcaagtgaaaaccagaattttggaaaacttaacgtcgcttgccatgagcttggtgtcttcccaacacctagagacttttctggtgaggtctgtgggggtgacagatggaatgtttccaccattgccagtgaaatgtgtcagcctttggaagacctacttgactcggtgggagatccttcctgaatgaccagcagagtgtcacgaagtcacatggggatggagtggcaaagagttgtcacaggcctgcagaaacccacctttgtccagcttgatgtggcctcagggctggagactcccagccatgcagaaaggctgtaaaaacaaacccatctccctttccagcctcaggcatccatgaggcctggcttccccacagcgtccccagagcccaggagggtggactgagcagaggtggaccccagggcccagctgcctccgattcagccagatagtaaggagatttgcagaaatgggagacaggaccactcttcttacttagcttatttttggagaaataactaacacgtaatgggttatttttaaatgaattaatatattttttaaatttccaagtttagagaatacagttatccaataaacaaaagctgtttggactccctaacttttgagagtgtaaagggtcctgaaagctgccgacacagcgcctcatgaactccaaacctgtgaggttggtattgtcaggcctagttacaggagaaagtgaggctcagagcccaccccccgggttgggccacaccactctttgcctagcggtaggtcttgggagttgatgccactattgacatcgcagggacaccgctgttcccagcgcatggcaaggctgaaaacacaaggccacagagacctagcttgtgctctggggtgtctgagcactggctgggaaaggcgtggctcggcgcaggctcagacccctcatggtccccagggcatcggcccagagggcagacgctggtgcacactgctctctaattgatgcacagcacgtagttcacacccaggaagtacattttaggaaattctctattgaagtgtaaacatgtggccacattacaagtgtctggctcaatgagtggttactaagtgagcatatttggatagccagcacctgaacccagaaccacctgaccagctgtgagaagccgcctcatccctgcaggtggccactgtccaggggtgcgcatccacagcagcccctgggctgagggacttctgagctcatccggcggcccctgtgctcgctgtaacagcagtgatccacttggcctcattttcagctcgacgtgggatcatatgatgtgtcctggcgtgtctggcttcctctgtccatgtcaggctggtgctgtgcaaaaacaccggttttctccactgatggaagctcccagtagagtgaggagggcacctgtgaattgagaaactggttttacagttttaaggaaacgcaacagggcccagaaaagccaagatgagcatgaagagcccgaagaaagtggctgctcacatggcaggacgccccggcccccaagctgcagtgttgggccccggcccaggagggagcccagaggcagagccaccggtcaacaggccctcagcaggaatggacaaggctgcagggcagggggacactgttggctcaacagtgtcacacacaagtcagttgtaggggctgtggcgcctttaaggcaagcttctggaaggaagcaggagaatatcctgtatcctggggttggcagagatccaggctgcaagaaagccctggctgagaccctgttccctgttcaggggctgagccagctctgtgctggccatggtgctctcggtggcctctcctcagccttgcccaatcctgggcatctctggccaggggaccggctcaggtgacctcaccagggcctcacagatcgaagtctcctgccccaggacctgcagcactgtagcgtagcaactacattgccctgtgtctgaactcatttgaggcgggctagggcttttgaagtgttacttctttccctcccctcacagcggatcgtgtgaagaagggatttgacttccagtggccccaacccgataaaccgatgttcttctacgtgacccagggccaagaggagattgccagctcgggcacctcctacctgaacaggtgagcagggacaggcccaccggcgtctgcaggtcttggggacagcttgagaggttgttgacccattctacttatttttaacatgggactgaaactttttttgccttcatttcctgtttagcctgtttagactctaaaccgtgttgtttctgcctccttttccattgtacttgttttttattgggcagatacttgctaatcccacatggcagccgtttctgcccctcgagactcccctggtgaaggctggggaagctcagctgtgcaaacgccagtgatggcagctgccttcccgcagggtgttgtgtctgcacccctcacggcctccagcctcagggctcgggatcccacaggtggagcccagcactgacagcctgggtttcttaggaccgaggctgcgaacgtggagaagatcaccacgaagttgctgaaggcaggcgccaagccggaccagattggcatcatcacgccctacgagggccagcgctcctacctggtgcagtacatgcagttcagcggctccctgcacaccaagctctaccaggtgcgctgcgccctcgggcacacttggtctcctgggccatgcaagggtattgacccttgacctttaagttaccccccaagaggggcccgtcctggctggagctcagaatggcccaggaagcaccagctggcccaccctctggggagggcacagacagcacatccccacagaccctgcgaaattccacatgatcaggacagagactttgagaaatacatcacagggatcagaaacatgggctgagattggcacatcaaggtgttttctcgggatggttgaaacaagtccaaggtggaacggcagtggtctgtgcctgccacacactggatgttgtgctgtggagaccgtggtgttcacacctttattgacacccggatgaaacacccactgcgggtgtgtggggaggaggcacagctctgcctccatgaggaaatgagcccaagtgctgagtctgagtggccacatggcagtggtttctgttctgtttttgagcacggctcaggttctctgggatgagcacgtgtgctcttagtgctgagaaacaaatctccgtggctaaaagagaacaggctaggtgtcatggcccacacctggagtcccagcactttgggaggctgaggcagggaagtcgcttgaggctaggagttccagaccaacctgggcaacgtagggagaccctgcctccaccaaaaaaaaataataactgggtatggtggcatgtgtctatggtcccagctactcaggagactgaggtgggatcagctgagcctgggaggtcaaggctgcagcgagctgagattgtaccactgtactctagcctgggtgacagagcaagatcctgtctctaaaaaaagaaaacaaaacgaaatggcagcagagccaggacagcccctaggtgcggtgagcaggcgccaggccccaagctcccgggtgggatttgagggtgggtcttggtgtgtttcctgcattttggggggactgggaaggcagcctgctggctgatagtgaccacaaagctcccttccaggaggtggagatcgccagtgtggacgcctttcagggacgcgagaaggacttcatcatcctgtcctgtgtgcgggccaacgagcaccaaggcattggctttttaaatgaccccaggcgtctgaacgtggccctgaccagagcaaggtagggaggctgcctgctgcatgctgcccagccgctcatcggtcctcacttcccagggaatttggggctagggttgggggttgccagggccagaggtcagaggactctgagcagcagttgagaaacgatgtctcactggagagatctttgtttccgtgtcctgggggtttgctgtggcccctgtgcctcagcccagcaggacgtatttttccaggcccttctggtctgattcaaaataaatcttgtgtgtgtctgtcaagttgtttaatctgagaggctgtaagttttggtcctgtccactatttttggttctaaaatacaacttttgtgaactgatgatagcagaagggaccccgagaacaaggtgtccattctgtcatcccacataaaactagacatcaggccaggcatggtgtctcacacatgtaatcccagcactttgggaggccgaggcaggtggatcacctgaggtcaggtgttctcgaccagcctaacatggtgaaacctcctctctactaaatacaaaaaaatgagccgggcgtggtggcacatgcctgtaatctgagctacttgggaggctgaaacaggagaatcgcttgtacctgggaggaggaggttgtggtgagccgagattgcgccattacactccagccactgggcaacaagagcaaaactctgtctccaaaggaaaaaaaaaaacactagacagcaaggacccattcaccagctggaagttggggggacctggcctgtggctccacccagcacagggagagagcctggtgctccttccggctcatatgcgcggtggttctcctctaggtcaccatggctttgtcattggttactccctctttctaaggcgccctcttgtttggtgggcagtattgggtgggtccccccacagcttcgtgaggtgggctagaggagctgggcatcgggtcagtgccccggcctgctgggggccctgtggggccgcgtgtgccccggtgcctggaaggccgactctcttgacagcaggtcttctctccaaacgtatccacccagccaggtgtctgccatggggctgcttagagtcggccacaaaatcaacccgtgtgcagggtcagtggcttggcattgggctttggggcctgtccctgtggctggcagcctgcctgctgcccggtccacgcctctgttgccttggatttgggttctgagtgaatgcagccttgcctcttggaccgtcctgtgagacgggcagctctccacctgcgtcctcagcactgcgcccttgttgcaggtatggcgtcatcattgtgggcaacccgaaggcactatcaaagcagccgctctggaaccacctgctgaactactataaggagcagaaggtgctggtggaggggccgctcaacaacctgcgtgagagcctcatgcagttcagcaagccacggaagctggtcaacactatcaacccggtgagcgcctgcacaggacagcagggcagcacggagaaacccgggcccaaaacactgctgggaacgtgccagcttggcccgtgtgcccgtgagctgagggagggctctcctaggggagggtgggctctcctaggggagggtgggccagcccacttcttgtctcccgagccgtgtgtggcatttttggcttggggccgctaagtcctgggtggcctctgggaattgggctcagggctgctgtgctgcatgcagcagcctgggaccttggacacgggcagttggaagctttgcaagcccggggtgatctggtagtgagggggtgtgaagcttcctgagctgaggcccaagggtcagcatcagagcccaggtctgccgaggagggcaggcgagacccagaggccatgagacagcagctccctcctgtctccagggagagcccctggcacagtgtcaacacctcacagctgcatacctgccacctcccaggccaccgggcccgtgggaagttgttccttctgttgagatgacaaattcctcacctatctaaaccttcgcagggagcccgcttcatgaccacagccatgtatgatgcccgggaggccatcatcccaggctccgtctatgatcggagcagccagggtgagtcgctcagcaggggacctggccgaccccttgtcctcacaccgggatgctggccgttcccatggctgcagctttaggtgcccccatctttccttcccctcaagggcggtgcctggctcccttggcctccccgcccctagggcatctctagccccggaacactcctggggtgtttgtctttaaccagagtttattcatttgtgtttcctggtgatcaagctagttagctttttcttgccttttggtagggcagggactgcatgtagtacaaatagaacattttcataaaaaggattttttttttcctttggtaaatgcagggtgattttcatttattttcttttttttgtttagagacagggtctccctatgttgtccaggctggtctcaaactcctgcctcaagcagtccttctgctcagcctcccaaagtgctgggattacaggcgtgagtcactgcacctggccaatttgcaggtgtttttttttttttttttttttttggagaccgagtctcgctctgttgcccaagctggagtacagtggtgtgatcttggctcactgcaacctccccctctgggttcaagcgattctcctgccttggcctcccgagtagctgggattacaagcacccaccaccatgcccggctagtttttgtgtttttagtagaaacgaggtttcgccatgttggcctggctggtctcaaactcctgatctcaggtggtccacctcggcttcccagagtgctgggattataggcttgagccaacacgcccggccccaattttcagtttttaagatctgtgtaggccaatgattcccagcagactctcctcggggaaggtgcctgcccaagcacccagccccaggcaggctgctgtagttaacatggagtcctgcgaatccgcatcttcagcctgggcagagccaggacagatgtgcagctccggctgactggctggtggggtgggtggggtatcgctggggtttgaccgaggcaggtgacacctgccgtgttccactgtgatttgcaggccggccttccagcatgtacttccagacccatgaccagattggcatgatcagtgccggccctagccacgtggctgccatgaacattcccatccccttcaacctggtcatgccacccatgccaccgcctggctattttggacaagccaacgggcctgctgcaggtgagcatctgtggctgcggctgggtgtggccctcctgagagctcttgagggtgtgcttgtctgcgaggccctggcctccttcggatcaccctggactgctgtctttcagggcgaggcaccccgaaaggcaagactggtcgtgggggacgccagaagaaccgctttgggcttcctggacccagccagactaacctccccaacagccaagccagccaggatgtggcgtcacagcccttctctcagggcgccctgacgcagggctacatctccatgagccagccttcccagatgagccagcccggcctctcccagccggagctgtcccaggtgagcccgcccctgggacgggacttacctgagtgagggtggggctatgcacctgaaacattccctctgaagagccccagagagctggcctggcccatgtccactgtctgaattacctgtccctgggctggggtcatcagagtgggtctcctgggtcttagtttggggacgggttttccattcttttctctggggctgctgagggctgggtggatgtgagcacccttggcctgtggcttgcttacctcctgaccttgtctttcaggacagttaccttggtgacgagtttaaatcacaaatcgacgtggcgctctcacaggactccacgtaccagggagagcgggcttaccagcatggcggggtgacggggctgtcccagtattaaaaggcaagcccccctggagcaggcctggccccaccccagcctcaaggagaaggatgggagggggctctccccagggagctgcactggaggggtggtatctggaaatgtgtgctgtgcctggtgggggtcataggccctcagggccagcttggcctgtgcccttcactgctagtcagggtggctcctcaccccaccctaccccatcctgtctgctccggggaccaccgcgggacctcagtttcctcatcagagtcggggagggcagctcgggctctccctcactgtcctgtgtgctgggtacctgtggggctcaggtcgcagcctctcaccgcctcctgcccttctccctcctgacaggtggcggcggaagagctaagcaacgtggcttagtccatcagcatcttattctgggtaataaaaaataaaaataaacggatacctgttttccactgctaaaactgaagcaccactgtgtgagcaacaggaagggagagcgcacgagggagaggagccgaggccgagcgccccctgctggcccgcggcggcgaggagcagagggagcggaggaggggccggcccgcgggagccgcggccaccaggaggccccgctccgtcccatcggggctgcggccagggcggagggaggaagaccctcatctcagagtagccctttcctctgttcttttatttctttttctctttgattgaaaggggactacgtcttagcaggaaaaaaaacttcgcatttctgtgcccgagcaggctccttgcaaagacagcagcgtgcggggcagagccccgggagggcgcgtctgtccacgcctaccggacgcgccgaggtcgcgctgcctgtgttctccgagggccttcatttaaagaaaataagggtgttttgggtttttctctttgtttttttcaagattcttttaaaggagtactgaagaatactttcctaagtttgtctgtaaaatcttagcggtggacctgggagatttgagaagcttccagaaacagtttaaacaagccagcgctactggagaagaggagcaacacctgtgccgcggccggaggagttttgttgttggttttagcttccagtggcttctttctgcggggcatcaggctgctggggtagccgcccgccgagcctggaagctgctcgttctccgctggactcagaagccaagctgcttcccgcctagactcggcgcagggccccgcaccggtgaggaaggtgcttttggccccattgcgaggggccttggccaggactggccctgtggccaggaggcgagaaggtggctgttcccggattgacggctttttcccgggggcctttggaagatttggtggaaggacaagagggcctgtccctgtccccgtccccaggaggtaccgacagtccctgtgctggttagacacggagcgctgcacaccgaaagcccaaattgggagctctgcctgccggcaactttgctgatggggtgattgctgcttctggggggtaaggaaacaagttacagaaattaccgcgttctgtgtgaagggactgagggtgtggtgtcattggcagagggtcattttaggagagctgccccagcccctcgaacgcctggcttggggtgtcattctgcctggcggccaggcctccagcttcccctgccccgggcctggggctgtcactggccctgatccgaacacctccagattccggcttctacatgggacagacggggacgcacaggccaccttccttctggcagggactcttatttattcccattgctctagggctttcggtttccccttcttccggtaggccgcgtagaggcatgcaccgggtaggtttccgcggtgaccccgcggcggcctgagggacgctccctgccccatcccggctgttgggctgggccgctttgcctctgcttcgccctgtgctgtgttctccagctttgtagcagcagccttgacaaacccaggcgcactgtaccaaggcaatgtaacttttgattttcggtcaatttaagttcttttgtcaccaaatattaataaacagttttgacttcacaccaaggttggataaactgcagggggtggagggtgctggggttttgccttggctgagtgacgggttggggtgtgaaggaggccagagggagacaggcaaagcccagaagggacaggtctgccttgcaggactgaagggcgacccctgcccctgggcccttcccgtaggcagcacctgggcctgtccgggcggctccccggagtggcgcgttaggcctctggcaggtggcctggaggtggaaaggcctatccgatcaccaagactgaggggcgccctccccaccacccaggcaaggagtccaaggagaccagcggagcagaccacgcggcatttattgttgggcccgcgtccctgcccgccccgggttagcggcagccgcactcgtccaccaccatgtcctcatactgccgcagcaccacgttgtcgctgttgtcaaagaagagcacggagatgggcgacaggcgcgcgggcacgcagcagggcaggtcggcggctcccggggcggccgcgtgcatgagcgcgcgcagcacagcgtggttgagcgccggcggccccccggaccccgacagcgcgacgggcagcgcgcactgaccctggcagtagttggccaggaagccgcgcggcgcgatgacccagcggtgccagcccacctcgcggaagctcacgtacagccgccgcgcgcgacaagcgcccccggggccgccgcccaacacgggttcggcgtcgcgccgcggccgggccagggggtggcacaggcgcgggtcgagggtcaccagcagcagcgaggcctcggccaggcgcgcgcaggcggcaggggcccgggggcgtagcgccagcgccaggcggaggctgcgcggccatgaggcgttgcgagcccaagcggcgcccagcagctccgcgcgcactggcggccccagggcgggcaccaactggcggagcagcaccggcccggggtccgcgcccgcgccctggcccgcttgcgccacgctcagctcccagccgccctccggggctgccgccgccgccgccgcgaaacgcagctccaggcgggcccggctcgggcgctcagcgggttccacagccgacaggtcgaagacgactgtccactcagggcaatgccccgcggccgaggcaggctccgaggcccgggtgggcgcacctggggaggtaggaacaggaactcggctcgcgctgcgtccccggcctgcccatggggtctcggttagggacagggaggaaggtgaacgctggggctcggggcgcaccgtctgtgggaagggtgtgaagcggcggggtgggctgatggagtgggggcagggcatgagttccaaggaaggcgccctgcggggtgcggcggggggggtgggctgccctcggcggggggcataggaggaggggtggccgaagtgggagacatgagccagaacctgggcccctggggaagccatgctagggtgtggggatggcatctgcaggaaggcattagtgtcaagaggtgggggtgggcatggggtggggacagggcttcagcatcaagcagaaggactggtcttgggaaccccctgacatgtgtccccggcgtgcagcagatgacgaggaaagggtgaggtgcggtggccgaagttgctagtagcctggacagggcgggtggggaccctcggagctgctcgggcatccccgggccactctcgaggctcgccctgcgaggtctggcctccaggaccagtgtccccagcgaaagccccactcaccgcggtccgggatgtggcgcacgatgtttccggcgacccccagctcctccacgtggcacggttgcagggtgacccctggggacgtccgccgcgagccagacctggtctcctgggggtcccggcgtcgaaacaggcgccacatgaccgggggaaccggccggagcctgggggcaccctggggctcatcgcgcagtcctagagcctggagcagggcggcggctgggcctgggggcacgggggcgcgggtcaggggcagcgagggcagcagcagggccaggaggaggaggaggtggtggccgcagggaccttgctgcggcggtggcatcttcctcccaggcgatgaccagagagtgcgcagggtccgcggcggcccgggaccagtgggctgagggcggggccggtgtccccggaggggcaggggtcctggggggcgtggccgggaactggaggcaggatgagggggcggggtcccaggggaggtggcggcggccctagaggagcagagttggagggggtggaggggcggccaaggacggggagcgtggccggggtattcggggtggggccgggtccacgggggcggggccgaggggttcagaagcgcttgtccttcaccaggccgttcctcagtggcttcctgggggtcagaaccggcgcaggttagcctgggagccccacgcggccgcctggccctctttcccgcttcttctctggccgtttcacaccccctggctccttttacccggccaggcccgggcctcgccttgtggcttcctcctcgccttcaccctgcccctccttgccttcaccctgcccctccttcaacctgccccgtaggcacgtatgtcccccctggcaccctggcacttcctccttgcttccccctctccaattaaaccttcctcttcccctcctccctgcctctccaggccgctggagggcaaaacccacgtaccggcctgggcctgacaactccaccgcctccacagtgggaccctgcacatcctcctctcctctgccacccaccccacgaaggctagtccttgactccagtggccctggctggcatctgctgtctccacctacttcccttccatgttcttttattttccttttttttttttggtcttactctgtggtccaggctagagctgtggcacaacctccaaggctcaatggatcctcccacctcagcctccagagtagctgggattacaggggcacgccaccactcccagcaatttttttttttttttttttttgagacagaatcttgctctgttgcctagtctggagtgtggtggcacaatctcagctcactggaacctctgcctcctgagttcaagcgattctcctgcctcagcctcctgagtagtgtggtggcacctgccaccacacccagctaatttttgtatttttagtagagacagggtttcaccatatcacccaagctggtcttgaactcctgacctcaggtgatccgcccaccttggcctcccaaagtgctgggattacaggcgtgagccaccgtgcctggccccagctaactttttttattgtttgttgagatgaggtcgctatgttgtagaggtgaggttgctatgttgtccaggctggtctcaaactcctgggctcaagcagtcagccctcctccgcctcccaaagggcttctgtcactttaattcgctcttctcttaggctgaagctcagcttctctgcatgcatttcacagccaactggctgtccccatccaaggactgttggtctttatctgagaggagataagccttgcttggacctcccatctgtcacttgtcttctgattttgcctgtgatccttgagaccgtgagtggcgtttcttcatccacccttgtggcttctcgattcttcccataaacaaacctccgtgacacactgtccccttttggctctgggatgactccagggattccatttctgcatcgacacctttggtataaggtgggggtttgccctaaggcttatgggaaacaaagacacaccctcactgtgttttccagagggtccccgtgctttccattcctgccctccaggatggtctttagtatttgctaaaggttttaaggtcttaggttagtttctccactcagttcccacagagagtatagattcctctaatggtaaagtttagcatcctcggtgatgggtgcccccgccctggggctttttatcagagctttcctgctgattcttgtttgttttttctgcaaaagcttcaaagtgttctctacccactcagaaacagctgtcagtatttgccttttgaggtgtgggtggcggtgtacccaccttgggggagatagcttttctctgttatctttttttcttgttttgtttttttttgagatggagtctcgctctgtcgcccaggctggagtgcagtggcgcaatcttggctcactgcaacctctgcctcccaggttcacgggattctcctgcctcagcctccccagtagctgggactacaggcatgcaacaccatgcccggggtaatttttttttttttttttgagacgaagtctcgctcttgtcccccaggcgggaatgcggtggcacgatcttggctcactgcaacctctgcatcctgggttcaagtgattctcctgcctcagccccccaagtagctgggattacaggcgcctgccaccacgcccagataatttttgtatttttagtagagatgcggttttaccatgttggccaggctggtctagaactcctgacctcaggtgatccacccgcctcagcctccaaagtgctgggattacaggcgtgagcgccgcgcctggctaatttttatatttttagtagagatgggatttcaccacgttggccaggttggtctcgaactcctgacctcaggtgatccatccgcctcagcctctcaaagtgctgggatttatgggcgtgagccaccatgccgggccgagatggccttactctgatggacaccttttggcttctatccaccactgtggtgaaaagagccagagcgagtgtgcagagagagaaggatgatgcaggcactttctagatgtttcttcatagatgaggaggagagggagacagaggagacaagaccccctgggctcttgcaagggttttgccccaaattgctgtcaacaccgatagactagtgttgacactagtctatcactagagagggagtctggggtgaaattgggggctgatttgagatattttagaagatgctggaaatgtcaaacacgggagatggagaatggcactcaggggagctgcgtggctaggagagaaatgtaggagtcggtgtggattaagtgtgggtagagaaagggccccagaagagaaggaggccagccaggaggccagagagacagagcaggagtgcagagtaaataaagggcttcaagggccaggcgcagtggctcacgcctgtaatcccagcactttgggaggctgagtcaggtggatcacctgaccctaggagtttgagatcagcctgggcaacacagtgagaccccatctctacaaaaattttaaaaattagccggggccaagcatggtggctgatacctgtaatcctagcactttgggaggccaagatgggtggatcacctgaggtcaggtgttcaagaccagcctgggccaacattgtgaaacctcatctctactaaaaaaaatacaactattagccaggtgtggtgtacacgcctgtaatcccagctactcgggaggctgaggcaggagaatcgcttgaacctggaaggcggaggttgcagtgagccgagatctcaccactgtactccagcctgggtgacagagcgagactctgtctcgaaaaaaaaaaaaaaagaagaagaaggggaggggactctctggggttagcaccaagagagccacatgggagctggacaggagtggtcttcgggatggggggaggaagatggggcacagctgggtttgaggaggacccaggaggatctaggaattctgctacaagggagggaaaacaggctgatgaggccagtggtggagaagagcagagagcacgttctctcctgggttgaaatgtccttgaataggcaagctgggtgaacatccctagcctcagagagagggactgttgtccactgtagcagcagctggacatcctcacccggccacttctgctttcttggggacatgttggccagattatcagtgcaggagatgatgatgatggggacagctggtgcccaggaaccctcaggagagaagatgctcctacatgggccagatgtaggtgctgaagttcacagttttctatttttattttttgagacagggtcttgctctgttaccgcagctggggtgcagtggtgcagtcatggctcactgcagccttgacctcctgggctcaagccatcctccagcctcggcctcccaaagtgctgggattacaggtgtgagtcaccgtgcccagcccagttctttagaactgctgcaggggcagtggcaggtgcagcagaggtgaaaatgggatttacggagcattgagtgcaggtcaccagatccagagagaggtgagagtgtctcaacggatggccggtcccggcagcccctgagagggcaatggggactttggacagaggggctgagtcatgacaaggacatgggagtgaccacaaggaagctacgggcgtcagtgtaggagagaagggtactggctacccacatcaccaggggtcccctgagggccatgaggaggacagggaattcaggggaaggggtacagatgaggggaccctggaggtgaggctgctcaagaagcagcaatggggtgagatggggtgaggaagagatcaagccaattaattgctctctgatttgcttcacgcctcctgagttacctaaaagtggttctcggtcttggttttctgaagggttccaatcctgattgaattttcggaaccaggcaaagtggctcatgcctgtaatgccagcactttgggaggctgaggtgggaggattgcttgaggccatgagtttgagaccaaactgggtaatatagtgagatctcgtctctacaaaaacactttaaaattagctggatatgatggtgggtgcctgtggttccagctacttgggaggctgaggcggcaggatcacttaagcccaggaggttgaggctgcagtggactatgattgagccagtgcgctccagcgtgggcgacagagtgggaccgtctctaaaaaaaaaaaaaaagaaagaaagaaacaggctgggcgcggtggctcacgcctataatcccaacaatttgggaggctgaggcaggaggaacacttgaggtcaggagttcaagaccagcctggccaacatggtgaaaccccatttgtaaaaatacaaaaattagctgggtctggtgacacacgcctgtagtcccagctactcaggaggctgaggcaggagaattacttgaacctgggaggcggaggttgcagtgagctgagatcacaccactgcactccagcctgggcgacagagcgagacactgtctcaaaaaaaaaaaaaaaagaagcttttggattcaactgttaaaacggtaatccacctggaatcctctctctgctgtggagagctttcttttattaaacttttgctccaacctcggcctttgtggccacgttccttaattttcttggtcatgagaccacaagctcagacaacaccttagacaacaagaccagtgaccctgacctgcttcaccatgataagtgtccttatgagagagaagagagacagaaaagaagaagagaaagccctgggaagacggagactgagactggagcaatgcagccataaaacaagaaatgcctggagccaccagaagcccaagaggcaaggaggggatcctcgcttagagttcccagagggagcaccgcccagctgaccttgattttgaacatctgtcatccagaaatattagagaataagttcctgtggttttaagtcacaagcttgtgttccttttgttatagagttcctgggaaagtaacattcaatgcctttttttcactgcaacctctgcctcccgagttcaagcgattctcctgcctcagcctcctgagtagctgggattgcaggcgtgcgccatcatgcctggataatttttcgtatttttagtagagatggggtttcaccatgttagccaggctggtttccaactcctgacttcaagtgatccacctgccttggcctcccaaagtgctgggattacaggcgtgagccaccgcgcctggtcttcaatgccatttttgatggtctctcatacctgtttttaaaataaacttttttgtttgttttggtttgtcttttttctttgttttgagacagggtcttgctctgttgctctggagtatagtggtgtgatcacggctcactgcagctccctggcttaagtgatcctcccacctcagcctcctgagtagctgggactataggtgtgtgccacaacacatggctgttttttgttttgttttgttttgattgggttgtgtgtgtgtgtgtgtgtgtgtgtgtgtgtaggaactgcatatccctatattgcccaggctggtcttgaacacctggcctcaagccatcctcctgccttggcctcccaaagtgctgggattacagacgtgagccaccacgcctggccaaacttttttattttagattaattttagatttacagagatgctacaaagggagtagagggagctcctgtcacctccatccagctcccctgacattacagcttacatttccatggcacatgggttgcagctaaagaaaccgacattggtgctttgctattaactaaactctccacatgatttgaattcaccagcttcttggtgaaggtccctttcctggtccaggagcccatgctgcaggtggcatctgtctccttggtctcctctgaccctggattgttcctcggtctttccctgattcccatgatcttgacagtttctgggcatcctgacgggctcttttggaagacgtctctcagcctgactgccttcgtcccatcctgttttatacccaactgcactaactccggctgtccttggagaatcgaattctgctggtggtgcctatgggatcaatcatcacagggtgttccctgatactctctggcacttctgtacagggtgcatgctttgctgtcctagaggacatgccagctcttaccctgtgttctgatgagacatcctcagcggggacagagccagacactggtggggctgggaggtctggcttcctcttgttctgggttctgcacctccgaggatgtccccaccatgagctcactgttctacagcaagaggaccttcctggtgtctagatgtggccaaactggtgccccctttagccatcgccacctttggaagactccttggagagacctagctgatctctggagaattcccgactcaggccggctgcagtggctcatgcctgtaatcccagcagctttgggaggctaaggcatgtggaccacttgagcccaggtgtttgagaccagcctgagcaacatgaggaaaccccagctctacaaaaaatacaaaagttagcacagcatggtggtgcatgcctgtgggcccagctacttgggaggctgaggcaggaggatcacttcctgggcctgggaggcggcggttgcagcgagccgagatcgtgccactgcacactccagcctggacgacagagtgagaccctgtctcaaaaaaaaaaaaaaaaaagaattcttgactcatgctcaaaggacagcgcaatctaacaccctcaaaaggaggctcctaacgccgcatctgccagaacccatgtgaccctctgccccaatcccatctcagtcaataccagctcgagccaaaagtcttgagtcgtctttgattcttttatttctgtttcatctacacccaaggcgaatctgatgggttctcccttccaaacagggtggggggtctgacgctcctctgcctggctacagccccggatgtgttaaatgtctgcatctcgcacctcccgttccaaaaaacgtcacggagctctgagccactgcttccctgaaaccatcgttcccacgtcaccgatggcccccaccggccaaatcagagggcctggctggtcggcaccttccagggccttccacaacctcctgccccggctcctgctcaaacactcctcacgttgcctatgagacactgcacacccgactctgcttgttacccagtttggcctccgttcatccctggcccagacaccccctgcctgccccaggcctggggcttcggacaccatctggctgtcacccagggctggtgaggctcgtgggctatctccttccccaggactcccacctgggctggactgagtctgagctcccagccccagctcctgtttggccgggcagtgggctcccctgtcaaactcagaggccaggatgtctcggcccagatggagcctgggttctctctgtggcccttggcgttccttcctccccagccccactgccaccagctccagtggcgacatgggtcagaggtcgtcatccaggctggccagcaactactcctcaccacccacagggccctggctcgccactcccgccacaccagccactaggcctggccctcagtgtccctaccgctgagaccctgcctgtcgccctgcctgcccctccccagcctctccctccccttcctcactgtcctgtccttcagggtactggccacatcgtccacgcctttattgcagtctctgttttggagtaggcttggggggcagcatccgcgtcggcctcatctgctgctgggtcttgggggcctgcccacgaacacgcttggacgggtgacactaaaggagggaacgcggggtgcgggcccctccacactcactcggctttgctgggcttcaggctctgggcctcggctgtgtcatactcccgcaggtccttcagctcgtgcacctggcctgtcaacaccttggctgcaaacgccacgatgtactgcgagaggggaggggaggtgccagtgagaagaaagcccccacgccactgccctgctgacagccatgtgctcctgtcccgggccctccacacgggctgtctgccacctaacgtgcccctccccgggactgcctgaggaggggacagggattgggacgaggacgggaccgccactgtggaggagagccggggccgactcaccaggaaccagtagaggttcataagggtgagcagcagcaggagcgcattgaagaagaagtagaaggggatgtcaggcaccgtgcgcagactgcagtgactggtggcatacaggaccttgagcgggaaccagtagaggcggaaccagaacctgcggtgggaggagtcaggaggccgtgggtggagggggacggtgccctacccagtccctgtcctatcccgtcctagacccacccttgcccccttatcccatccttgcccacctctgcccacctgtttctactactgctctgtccttcccctcccctgccatgccccgcccacctcgccaaggccccacatccttccccgcctggccccccacttccctgccaggcctcacccacctcgccaaggccccacctcctccccttcccagtccctccccttctctgctaggccccacctacctcaccaaaccccacctccttccctgcccagtccctcccctttcctgccaggccccacccacctcaccaaggccccacctccttccctgcccagtccctccccttctctgccaggccccgcccacctcaccaagcccccacctccttccctgcacagcgcctccctttctctgccaggtcttccccaccacaccaaagccctacctctttctctgcctagccctaccccaaccctgcttggccccacccctggcttgctctgtattagtctagctcttccccttccatgcctggcccaacctatctcaccaggcccctccccttcctggatccacccacctcacctggcttatccttttctgcccagccccactcctagctcagttggccccacccttgtcctactcctttcctgtatagccccgccccttcagtcccacccaaatcatgaggcccctcccctgtcatgccacacacccacctcaccgggccccgcctccttccctgcctggtcccgccccttttctggacacacccacctcaccaggccacacctccctccctgcccagcactccctaccactcaccagctgaagccgaagctgaggcagcccaagtctgctgccaaggcatgcagccgatggtaggagccgccgcgggacttgaagtaaatgttgagcttggtgaactcaagctgcacgtcactgatatcgtgcaggaagagcacaaggatgcccacattgtggtacctgggggagcagcaggcagagaggagagggcagctcacattgggggacctccactctgcactaaggcccccagcagagtccctgggctacacctcaggctccccgtgggcctcttcaaagccacccttcctgcctcgcctgccctgcccatctccacttcccaggatgccctttcctcactgtcccccacttagccgtgcacccccaaccagaccctcatcttccctgcctcagtgtccccatgtggcccagggagctccctggaagtttatttttcttttgagacagggtcttgctctgtggcccaggctggggtgcagtggtgtgatcgggcccactgcagcctcaaactcctaggctcaagtgatcctcccacctcagcccccggagaagctgggactacaggaaagcaacaccacacacggctaatttttttaatttttagtagagactgggtcttgctatgttgcccagaatggcctcaaactcctgggctcaagcgatcttctcaccttggcctcccaaagtgctgggattacaggcgcgagccactgtgcccggtcttggaagttccttgctggcccctcctcatcttggtgacctctgaccctctatgacccccgactctcacaggcctggggtactctgtgtccagatcctccatgagcttgtccctcactttggacaccaccaccatgatgagacttccaggtctgtacgtgcagcctggccatcgctgcaggaaaggcctctgccgcagcccatcaggatcctttttttttttaatttttttttttttttgagacagagtcttgctcttgttgcccaggctggagcgcaatggcacgatctcagctcaccgcaacctccacctcccgggttcaagcaattctcctgcctcagccttcccaagtagctggcattacaggtatgtgccaccacgcccagttaattttgtatttttagtagagacggggtttcaccatgttggtcccgctgatctcgaattcccaacctcatgtgacccacccgccttggcctcccgaagtgctgggattacaggtgtgagccaccgtgcccggccccattaggatcttaataagcccgaaggccatcccctgtccttccacagagtctccatctgacagatgagctgcccgagggtcctggattcaccctggacgtggggaagtgtctctcaccaagtccctgttccttgctctgtctcctgacagctcctgggctcctgccacaggtcctttgcacgtgctgtccccatgacccagcatgccagtgcctggcattcagcacctcccttcactcctttcagtctctgctcatctgctcatctgtcacccccagaccaactaacacctaacacctgcagccacaatttttttttggagacacagcctcactctgttgcccaggctggaatgcctcggctcacagccacctctgcctcccgggttcaagcgattctcccacctcagcctcttgagtagcttggactacaggcactcatcaccatgcccagctaatttttttatttttagcagacacagggtttcaccatgttggccaggctgttctcaaactcctgacctcaggtgatccacccacctcggcctcccaaagtgctgggattacaggcatgagccactgcacctggccttttctccataattcttatcaccttcaaatgaactgttccttccttcctttttggttctatcatctgattctgccctctagagagccttgaattatagaactttctagaactatgggaatgttctaaacctgtactgtccaacatgggagccaccagccacttgtggccactgagcccttgaactgtggcttgtgtggctgaggaatggaataggggctttttaaaattattttttaaactaaccagacgtggtggctcacacctgtaatcccagcactttgggaggccgaggcaggtggatcacttgaggtcaggagttcgagtccagcctggccaacatggtgaaaccccatctctactaaaaatataataattagccggtgtgatgtcatacccctgtaatcccagctacttgggaggctgaggcgaggcgggaggattgcttgaacctgggagccggaggttgcagtaagccaatgtcatggcactgcactccagcctgggcgacagagcgagactctgtctcaaaaaaataagtaagtaaataaataagataaagtaattttaaaaatgtatttatgtacgtgtttgtttatttttgagacggagtctcgctctgtcgcccaggctggagtgcagtggcatgatctcggctcactgcaacctccgcctcccgggttcatgccattctcctgtctcagcctcctgagtagctgggactacaggcgcccaccaccacgcccagctaatttttgtatttttagtagagacacggtttcactgtgttagccaggatggtctcgatctcctgacctcatgatccgctcgcctcggcctcgcaaagtggtgggattacaggcgtgagccaccgcactcagcctaaaaatttatttattagagacagggtctccctacgttgcctaggttgaactcaaacttctgggttcaagcaatcctcctgactcagccttctaagtagctgggggactacaggcatgagctactgctcctggagttttatttaagtctaattaaagttgaaagggccacctctttgttgctctatatttgtggggcgtggctaccctattatcgcagctagagcagctagtcccgtaggaatagtatatgagcagtgtatttcattttaaagtttctattggccacatttaacaagaaagagaaaagaacaggtaatattaattttaataatgcattctaattaattcagtatatccaaaatattgtcatttcaatatggagtcgagataacaaggccaggcgtggtggcgcacacctgtaatccccacacttcggggagctgaggtgggaggatcacttgagcccaggaggtccaggctgcagtgagcaatggtcacgccactgcactccagcctgggtgacagagtgagaccttgtctcaaaaaaaaaagagagagagaaataaaagggtggataagatattttcactcgtttgtatgtgaaggctttgaagccgggtgggttttatgcacacagcatggtgaggtttggacagactccatctgaaaggctcactgacggctgtggttggctctagaacatcagggtgtgtcagctgcgttcacagccatgcccccattgcttgggcgtggcaggtgctcaggaactcctgggtgtgtgacctggctggtcaagggcagcgtctgaagagctgggtgggtgagtggggtggggtggctatggctctctgggcctgtttcaccccatcccagcggaatctccctcaggaatctccgggcccacatcccctcctcagccttcctgcctctggtctgtcccctcgtcggacccctgagcactctgaccttggaaccctgagcactccgacctgatgtgatcccctccacggcctcctctgtgccccgccgcaacatcagcctccgcactctgtgtgggctgtgcctcggccccctgccacccgatcctgtccttaccggaaggcgtaggaggagacgatgaggatgagagtgaccacgtggtggagcagcatgaccaccgagtccttgcgccaggtgtccatgtatagcgtagcgtagatggagtggccatagaagcttccctggagcaggtaggcggctgcaatgtcccgtggcactgccatgcccggcgtccagtctggggagagccaaatctcacagtcagggccctgcgaagcctctagacgatcgcctccatgacccggtgacaccctccaagccacacgtgtcctcccagtacccaggtaaccatgcgtgtctgactgctggctttccattcccaattctatttttttttttttttctttgagacggagtctccctctgtcgcccaggctggagtgcagtggcatgatctcagctccacatcctgggttcaaacgattctcctgcttcagcctcctgagtagctaggactacaggtgcatgccaccaagcccggctaattttttgtatttttagtagagacggggtttcactgtgttacccaggatggtctcgatctcctgacctcatgattcacctgcctcggcctcccaaagttctgggattacaggcgtgagccaccccgcccagccgtctttttttttttttttttttttttgagacagagtctcgttctgtcaccagactggagtgcagcggcacgatctcagctcactgcaacctccacctcccaggttcaagcaattctcctgcctcagcctccagagtagctgggattacaggcgctggacaccatgcccggctaatttttttgtatttttagtagagatgggcttttgccatgttggacagactggacttgaactcctgatctcaggtgatccacctgcctcggcctcccaaagtgctgggattacaggcgtgagccaccgtgcccggccagcagggatttttattttaggaagagttttgggtttctaggaaaattgagcagataggacagaaagttcctttctttcttctgccccaacatacccacagatttccatttccctggctttaagtggtatatttgctacaaatgctgaactaatatagacacattattatcattatatacatttaaaatgttttatatatagttttagagttggcttgttctgtggcccatgctggagtgcagtggtgtgatcatagttcactgcagcctcgacctcctgggctcaagtgatcctcccacctcagcctcctgagtagctgggaccacaggcacccataaccatgcctagataatttatttcttttttaatttttgtgttgccatgttgcccagggtgatctcgaactcctgggctcaagcaatcctcctgccttggcctcccaaagtgctggggttacagggatgagccacctcacccagcccagcgccccttctcgttttttttttttttttttttttttttgagatggagtcttgctctgtagcccaggctggagtgcagtggcgggatctcggctcactgcaacctccatatccggggttcaagtgattctcctgcctcagcatgccaagtagctgggattacaggcacccaccaccatgcctggctaatttttttttttttcagtagagacagggtgtcatcatgttggccaggctggtcttgaactcctgaccttgtgatccgcccgcctcggcctcccaaagtgctgggattacgggcgtgagccgctgcgcccggcctcttcctgtctttaacagagccctgccttgcgggtgtcctgggcccactccctgcaaatccctggccctgacagatgcggctgcccacggagtcttgccatgcccgggcacaccatgccaccaagcgcagggtctcccgccaagcgggtcctgcctcaccttcccctcctcctgcctcctggtgcacctgaccaccacgctcaggtgatgggtgacacaccagcccaccccaccacgtccacctcctcctctcctcagccacatccccagaggctgccagacaccaaattcaagggctatgctctggacgggcacggtggctcatgcctgtaatcccagcattttgagaggccgaggcaggagagttgcttgagtccaggagttcgagaccagcctggacaacatggtgagacgctgtctctgcaaaaaaatatataaaaattagctggggccgggcgcagtggctcacgcctgtaatcccagcactttgggaggccgaggcgggcggatcacaaggtcaggagatcaagaccatcctggttaacacagtgaaaccccgtctctactaaaaatacaaaaaattagccgggtgtggtggtgggcgcctgtggtcccagctactcgggaggctgaggtgggaggatcacttgagtcctgaagggaggcagaggtggtggcaggaactaagatgttgccactgcactccagcctgggagacacagccagaccctgtctcaaaacaaaacaaacaaacaaacaaacaacaaaaaaaggcgggaagccatgctgtgctctgcccacaccaacctggaactctctgggttgctccctgttctctggccactccctttctgcagacccccaagacagaccctccagcctccatctgcggcttcctggcccctgccttggtgacctgccctgcagcccagctgcctccagatgccccatgaaccgcctctgcgacaactttcatctcggcctggccccttctgcagccgagttacactaggacccccatccagggtcccctctttggcccatgccacccccaccccagtccaggcactgttgtctcctgcccacatctctccagcgatccctggcccccatgactgtttgtccactctcctcactcagccctgaaggccatgtacacacaaacggtcaccatgacccagcaagtccactagggtgtgtgcctgacaatggaaaacggggactcaaagagatactcatgtgtccctgtctacagcagcacacaaccaaaaggcagacacaacccgaatgtgcatcagtggatggatgaagaatagataggttacctccacacagtggaatactatgcagccatgaaaaagaatgaagcacggatccatgctacaatgtgggtgaaccccaaaaacatgatgctgagtaagagaagccaaacacaaaaggtcacacagtgtgagactccagtgatctgaaatgcccagaacaggcaaatctacagagataggaagtagattggtggctgccaggggctgggggagaggactggtgagtgactgctaatgggacggggtttccttttgtgggggatgataatgttccagacctagacagagggggtggttgaacaacactgtgaatggactaaaagctgatgaactgttcgctttaaaatggttaatttttggccaggaggtggaggcaggtggatcacctgaggtcaggagttggagaccagcctggccaacatggcgaaaccctgtctgtactaaaaatacaaaaattagctgggcatggtggcgcatgcctgtaatcccacctactcgaaggctgaggcaggagcatcacttaaacccgggaggcggaggttgtggtgagccgagatcacaccactgcactccagcctgggcagcaagagtgaaactccatctcaaaaaaaaaaaaaaaaaattgtgttaagatttatatggcaaaaacttaccatctaagccatttgttaagtacacattattgtgcaaccatcaccagcagccatctccagaacattctccttcttccccaatggaacagtcctctgtccccattaaacagtctctccccattcccctcccccagccctggcaccccccatcccactttctgtctctatgagtgggatgactgtaggaacctcatataagtggaatcacatagtatttgtctttttgtgattggctaaaatgcctaatttcaagctacatacattttacctcaataagaaatggaggccaactgaggtggctcacgcctgtaatcccaccactttgggaggccaaggtgggtggatcacttgaggtcagaagttcaagaccagcctggccaacatggtgaaaccccagctctactaaaatactaaaattagccagacatggtgatacacacctgtagtcccagctattcgggaggctgaggcaggagaatcgcttgaacctgggaggcagaggttgcagtgagctgagatggtgccaccgcactccagcctgggtgacagagcgagactccatctcaaaaaaaaaattagctgggtgtggtggctcgtgcctgtaatcccagccactcatgaggctgaggcaggagaatcccttgaacccaggaggcaaaggttccagtgagctgagatcacaccaccacactccagcctgggcgacagagtgagaccctgtctcttaaaaaaaaaaaaaaaaaaaaaaaaaaacaggctaggtgcggtggctcatgcctgtaatcccagcactttgggaggccaagggaggcagatcacctgaagtcgggagttcaagaccagcctgaccaacatggtgaaaccctgtctctactaaaaatacaaaattagccgggtgtggtagtacatgcctgtgatcccagctactccggaggctgaggcaggagaattgcttgaacccaggaggcagaggctgtggtgagccaagatcgtggcattgtactccagcctgggcaacaagagcgaaactctgtctcaaaaaaacaaacaacaaacaaacaaaaaaccctcccctattccagaatttctttctttcttttttttttttttttttttgagacagagtcttgctctgtcgcctaggctggagtgcagtagcatgatctcgactcactgcaacctctacctcccaggttcaagcgattctcttgcctcagcctgccgagtaactgggattacaggcatgcatccccacgcctggctaatttttgtatttttagtagagacagggtttcaccatgttggccaggctggtctggaactcccggcctcaagtgatccgcccacctcagcctcccaaaatgctaggattacaggtgtgagccactgcacccggcccacttcagccctcttccagaatttcaatgaaaattgtctgaaactctgaaatgccctgatcctctccatcctgactctccagaaacatgtgagcccgagcttttgcccagggccaccctgctggatctgttgcccacctttccaacagaggccccccaaccgtcctgtagctccttccccacaggataggggggaagtcctggcttagttcagaggtctcaaatctcctctccctcgttttttgagaaagggcctcactctgtcaacctggctggaatgtagtggtgcaatcttggctcactgcagcctcgacctcccgggctcaagcctcagcctcagcctcctgccccagcctccccaggagctgggaccacaggcacgcgccaccatatccagctaattttatttttttattttttgtagagatggcgtctcactatattcccaaggttggtctcgaactcctgggctcaagtgatcctcccaccttggcctcccaaagtactgggattccaggagtgagtcaccgcacctggcctgtcccacctcttcatactcatatcccacctgctgttgggacactcaatgccacccctgccttgtctccatccctgaatccagaatcttggtctccctgaccagcccccatctcacaagaccctagcatcatcctcaccctcttcctttcacaccacctctagggtggcagcaaatactatcagctctgccttctaaacatttctaaaattggccactttgctcccatcccctcccctcagctcaatcctggtgggagtcccttcaggctccagctcctgctgtcagccccctcctggacccctggggtagatgcccaacccagggtgacatccctcctctgctcccagcccacagataagtaacaaatcctgaccgtggcctccgaggcctggatggcatggcccccacttgcctggacagcagtccctgcctctcctgcctgctccaggcacctccaggccctcactcagtccccttaagtggggccacccctgtccctgctaaaaactgcccctccccacctccccaacacagcacactgcctcttctctccacacaagttttctcatccacacttattgctgttgatagactgcgtactgcaccgtctgttgcccctgccacacggccagcttcatgagggcacagggctttctctgacccgttactagctgtgtctcagctgtggcatacagtagtcgctcaataaatagacatggaaataatcagctaacttgtgagtgtcatttacaaaaagcaactaaggctggacgaggtggctcatgcctgtaatcccaccactttgggaggctgaggtgggaggactgcttgaggccaggagttcaagaccagcctggccaacatagtgagaccccatctctaccaaaaaacacaaaaaaattcgctgggggtggtggcacacacctgtggtcccagctactcagaaggctgaggtgggatgattgcttgagcccaggaggtccaggctgcagtgagctgtgatcgtgccactgtactccagcctgagcaacagagtaagaccgcgtctggggaaaaaaaaaaaaaaaaaaaagcagctaaaggcaagtccatgcccaaaatgttaagagaggctgggcgtggtggctcatgcctgtaatcctgacactttgggaggctgaggcgggcggatcacctgaggtcaggagtttgagaccagcctggccaacatggtgaaacctcgtctctactaaaaatacaaaaattagccgagggtggtggcgcgtgcctataattccagctacttaggaggctgaggcaggagaatcgcttgaacctgggaggtggagattgcagtgagccgagatcgtgccattgcactccagactgggtgacagagtgagactgtctcaaaaaaaaaaaaaaaagttatgagagttcgatcatgggtcatccgtctagaaggaaaactgagcaacagctaacacctcccctctaggggatcaaggtgtgttacatgggaaaactggccccatgggtggcacatccactgtacactctgggctccgtgccaccaggagccctctaggctgttcccatcacatggcaggaaacagctatcatgtgtgtccctggcccacagccctggtggtcctcgcagggcagagaagccgcagcccccactgccccatcgcagatggggtttcctacatcagcctgcccagtggcgatgccggccctgccctgcattctctgccaggacaggtcacacagagcgcgctgcagtcacctccctgcccagcccacccggagctcaggccacatccactccaatcaattggacacagccacttcttatcatcttcccctccacacccccaacccccaggcagggtctcgctctgttgcccaggctggagtgcagtggcatgacctcagctcactgcaacctccacctaccgggttcaagcaattctcccacctcagcctcccaagtagctggtactacagacgtgccccaccataccaggctaattttttgtagagatggaggtcttaccatgttgccccagctgctcttgaactcctgtgctcaagtaatcctcccacctccgcctcccaaagtgttaggattacaggtgtgagccagtgagccaccacgcccagcccacttctcattctcatctttttttttttttttggaaatgaagtcttgctctgtcacccaggctggagtgcagtggcaccatctcggctcactgcaacctccgcctcccgggttcaagtgattctcctgactcagcctcccaagtagctgagattacaggcacgcgccaccatgcctggctaatttatttttgtatttttagtacagacagggtttcaccatgttggccgtgctagtcttgaactcctgacctcaagtgatccacctgcctcagcctcccaaagtgctgggataacaggcgtgagccatcgcaccaggcttcatcatgtttatctcctcaccaagatggtgcaagccgaggggaccctcccacctccatagggcagccagaggaagcattttgtcatccacaaaacccaatcctctccatgctgtgcttaaaaacatcacattcaggctaggtgcagtggctcacacctgtaatcccagcactttgggaggctgaggcgggcagatcatgagatcaggagattgagaccatcctggctaacacggtgaaaccccgtctctactaaaaatacaaaaaattagccgggcgtggtggcgggcgcctgtggtcccagctactcaggaggctgaggcaggagaatggcgtgaacccaggaggcggagctcacagtgagccgagatcgcgccactgcactctagcctgggcgacagagcgagactccatctcaaaaaaagaaaaacaaccacatccagaacagaactcaagctgctgcctcagctctctgcagccaccctcctcctgtccccatgaaacgtgagtgcctccgggcctttgcacgtgctgttaccgacacctggaatgcctgcctggacccacacaggggtccttccaggatgtcttccctgagctccaacacggccagataccccctttcctgtccccagggatcacctttgtcttggggctggcttaacttctgagacacccataggagctctgattctgataagcatccccttacactgttctttttttcttttcttttttaatacagagtctcgctctgttgcccaggctggagtgcagtggcgcgaactcggctcactgcaacctctgcctcccaggttcaagcgattctcctgcctcagcctcccgagtagctgggattacaggcgcccaccacacccggctaattttttgtatttttagtagagacggggtttcaccatgttagccaggatggtctcgatctcctaacctcgtgatccactcaccttggcctcccaaagtgctgggattacaggcgtgagccactgcgcctggccctctttttcttttttgatacaagacagggtctcactctgtcgtccaggctggagtgcagtggcgtgctcatagctccccttggcctccaactcctgggctccagtgatcctcctgcttctgcctcatgagtagctgggaccacaagcctggcgtctttgtgttttaagcagagccctcccggccatcccctcagggcccctaccgtagaagacagatggtgggtcatggaagaaggggtagtcggtgccaaacagcaggtaggcactgtagctccagctgcccaggtagaagagaaacttccaagcgctctcgggcatcttggcggcatctctgggctggaggcagcaccgcttcgccaggggctatgggggagaagacaggcgggcagccattggtgctgggggccagagactgctcctttggggtggggaaactgaggcccagggactccccaggccgggcagcactgggaaggcctgtcccccatgcccacagccacctggagcataaacagagcccacaggcgcctgccaaggctaaacttagtgcccagctgtccggccgccgcggtgctgggaggggagtgaggggggaggccccgaggggagcaggagggctctgggggccagaagggggacacttgggcttacgatgagggagacggatggatgcgtcagcccaagggagttgggctggtgggggtgacccttgaagggaacatggagggggttatatgggggcatcttgggaaacacagagagccccatgggaccgacacagaggggagaggaagaacttgtgaggaagccgccccctcagtgggagattctggagaggctagagggctgggagagactagggggaaggtgtggcggggacatgggaacctgggggcgatgaaaggggaggaggggctggaggcagaaaaaggggacaggaggcggaaaaggtgtcacaggcgaggtgagaccctgaggggacattgggagtgcagaggaagctgctggctccaaggcaggggttggggagtgcggtgggtgggtgggtggcggggcgcggctccagagctgcccggccaagccccacccctggacaagtcccacccccttcccagaggctgagggggccggagcccagagcacccagcagttgtcatggagacagctggagccggctccggtaacccctggcaaccaggctgctgccaagaagatcagctttggaacacccggcagcccctccacccatttctgaggaagggcgagcctcgaaatggggcgagcaccccacccaaggggctggggagggcccccggggctcggccctggtagtctaccagccgccacatcctcctgtcccgcaggggtgggggacggcttgccctcctgggtctcgggcttcccagctggaaactgggaagaaggcaggggcaacaagcaggataaagaccactgcggacccagggaggggccctggacagccctgtctccccctcccacagtaggggtgtggctggggtctctccctcatgtgggtgatatggggacgggagtggggagagtggcagtcagacaacatcccatcatcgacctcacaagggccagcctcttcccggccagcagagaaaggcccctttgttggcgctgggcacattgtccctgcaccctccagccagacgggcggggtgacaccagctggtccacgggggtgtccaggccaagctaaaggcccaaacaccttccaaccagctcctgccacagcgacccctccccagggaagtgagtggggtcaggcgccaatgtcaccatcatggtcactctctcgcaggggcgatggtctccgcagaaactggggaattctgctgtcgcctcttggaggcagcacagtccaaccctgaagccccgggccatgtcacctccaagggagcgaccactggcgtggccagagcacccaggcccttgccatccctggtcggagggtggcgctgaccccagataggcacaaggcagcgaccgggcagctcctgcctcttcccgattacagcgggcaagccggccccgccgccgcacggacccagcagaaaacgggcagcggacctcgctccgggccggggcgcagcccgcatggcagggaggcgcatggcgcaggccgcggtgcgccgagccctcccgttcccggtcctgggcttctcagtgtctggctcggccctgccggaaagagcgcgcggtggccggagccatccaccgcgcggggccccctggtcccaaactgaccggaaagggccgtgcctcggtcccccacgtctcaaacatcccacctgtctcgggccccccatgtcccagactcaccccagcccggccacacccccgcatctacccggttcccccacgcagcactgtctgaagggggcgcgcggcggcccgagagaccttatcctggggctccaacgtcctgggcctctccagcccgaggcccccacccacgttccggcgaccccttcatccgcagcagccagcgctggaagaaaggaacgcgccggcggccccaggtccccggtcccggcttcccccagtccggggtcccctcgtcccggcccccggccacactgacccgaaagaggcgcgcagtggccgcggagcgcagggcggtccagcccagcgcgccgagcgccagcagcagcagctcgggcggcgccaggtgcgcgtgctcagccaggccgcgacgcgccagcccccagccgcagtccgtgcagccccgcgccgccgccagcgcgctgccccagccgcgctgcactagctgcgcgtagctcggcatgggctcgggccccgtcggccccgccgcgggccccgccgccgccataccgcccgctcgcccgccgtgcccgtcgcctgcgcccgcccgcggtagccgacggagccgcgcgccccgcgtcacgcgccgcagctgggccgggggcgcgcgggcgggagagcggagggcggaggggcgggaccggcgcaagctccgccccgctgggggcgcggctggggggcggccagcggggacgcggggcgccctggaggcgggcccgcgcccctgcccgtttcccagcagagaaacccaggcgcgggggccggagctgggggcccgttggacctggaccccgagagaccccgcgcaccgccgtgtcgcgcccccatgcctgccccgcgcgccccccgctcccccaccccaccgcgccgtgcccgtgacggggggcacgggggacactagcaggcagtcccctcgactggcgacccccgcttctcccggccctccagcacgccacgccgctcccgctccatcgccccggcccgctccgacctcaccgttcttggagccctcgctccttctcaaggacccgaggcctggcacgccttggcacagtcttgggaccatcccgtggccctcccgcattcaggaggcgtaggctcaatgaaacattctcattcttcaaaaggacacggcccacgccagggcgttgggaggcgcacctagtggagacgcagctctctgccctacaccaggagcttggcaatggggttccagcttggacgcgggtaccctgggcacttcccaggcatcttcttctgcaggtctgcacagcgggctactgggacaaaggtgtgatgggggctgctgagattagggggttctctgagggtcacttgctgctgtgaccctggggaacccggggggggggctccccaacatcaggttaatacatgagttgcagagaggctgcaggagtgggtgccaacgtgggagggactcccaatctggatcgactgtgacatcattgggaccaccataagtgactttccaatgcactgttcattgacaaggccctgtgcccaaagccactgaaggccatcgaggaagacactggtcacctctgttaggaccgccatctccccaggcactgctgcaccccccctccatcctagcccgcaggatgtccccacacctggccttcaaggtgcaggatgcagggatgagtcctgcagcagccgcgctggctcccgaacacctgcacctgaacttcaggggcacaggtgaacacaccttccccttgccccacaccgagtcccccacaacacatccaggtggccctgcatctggccacttctctgcatctgcacagccttgccccccgctccccgccaccaccaccactaccaccactaccctcttccgtctggtatcctggcttcctcctcaccccacagaggtgagaaggtggctgcgacgctgttggcctgttcctcgtctgcttgcagccctctatggctcctgttccactcagggaaagcccaagtcctcactggctgccctcacagcgccctgtttccctccgcctgtgggcttttctgctgttcttccaacatgccaagctctgtcctgcctcagggcctttgcactagctgttcccccctcctgaaatgctgttcccctaggtacctgcatggctcttctgccacctgctcaggctgcccccgactctgaagtcacacgcccctcatgtcttcatgtctgcttggcacttgtcaccatctgcccctacatacatacagctcatttttttttttgagttggagtcttgctccgttgcccagactggagtgcagtggcgcaatctcagctgaccgcaacctccgcctcccaggttcaagggattctcctgcctcagtctcccgagtagctgggattacaggcgcctgctatcacacccagctaatctttgtattttctgtagagacagggttttgccatattggccgggctggtctcgaactcctgacctcaagtgatctgcctgtcttggcctcccaaagtgctgggattacaggcatgagccaccgtgcctggccccactctttattcttgaacgtggactccatgtggactaggggcctagtgtaggggtggggcacgaggcttggcctggccaatagttcaggtccagccggaggccagagatgtgactaacgccacaacctgcctggcaggcagagggggacgagggggatatgctctcaaaggtccagccaggcctgtggggcagccgtggacagtcccagccacctccctccaccctctcggccagcactatctggtcaccatggcgcccatcggtcacgggagaggcgccacccacccacccactagccccagctcagcctcgaatttctttttggcgggtccagccaggaggctgccaacgggtgggtgcagggcaggaatggaaggcggctctactggcagctggggaccaggcacccaaggctgggcggaggtcagtcttgaggccagtgtccccccacccaccccaaggtctcctccctccagaaagctcggcctggacccctcctaatgtccctgtccagggagtcctcttttgccacttccctcccctaccaggctgggggtgggggtcgcttgctgtcctgccctggcaaccagagacggggtctggtttcaaatgaataggcctgggtgtggcttggggaaacccagtcttatcttttccctgggagataagcccaggccaggctcagaggtcaaagggcatgcatccccatccagcgccccttgacctcacagccctgtgccaccgagggacctctgcaccggtcatgcccactgccagggtgcctgtccccctagaacctagcctggcagctcctttttgttgttcgggtgggcacagctcaatggtgacatctgggaggctccggccagccctgctgccacccacccacctccctccctaaatggtgcggccgcctctcatcgcggctgggtgcttggccccaggaccctgccacagcaggactctgccttggaggagggtttgcggggcggcaggagcagcacctggggttaacgctgaccctgcagggcccctccggctttgctgagctgaggcctgagtttttcctgccctggcccccacttcctccaggccactaggggttctcattttgaatcttggtgcccctcatgatagcggcatgacttctctgtgcctcagtttcccccgatgccaaccagggctgctcagtggcctctaggggccagggtgaagcatggggacagggctgtgctgcctctggcctgcaggagcaggttgtggctgtgtgaggggcggggtgggggtctgcacacctgctgctcgtcacagaccctggtctccaggaacagccctggatgccagtgccccaggactctccctgagcgtcagctcccacacgcccccagcaaagtgaccagagcacatcatcaggtggaacaccctggagttgagatatttattaacagatgggggtgctgggggtgggctcctgcccccagaggggatgcaggtggatgccgggtggggagggctgcagggctggctcctggcctctgtcctggcttcatggtcctgacagctctgggccagcctcaggcgctgggagcgtactgtagcaccagcctgtcaaagtcgttctcctttagcaagacacatggcaacacagggtgggggcagggtgtggggagacaggtggagggagagagagagggcgcatgtgagcccaggctgagctccaggcgccccctggcctggttctcggggacaggccatccccaccactcaccttggcctggtactccttgatgaagggatgggacctgtgggcatccttcagctgggacaggtatcggtttgtcacctgcaggggaggcagggaggcaggtgagccgaacacggggaccccacggtggctctgacctgctggacaggggtggattggggtgagagccacagtaccccagggggctcctcaccctgccttgggactgggctgatctcggagaaccttcagggtgggggtggagggatgggcctgccccctggagaggcgctggcatggagctggcctccgtacatggtgggggatgtattgtggtgttcaggggagcaggtcgggcagggccccaggtgaggatgggttggggggcacagggtttgtgagggaggtgggctgcggtaggcatactgtatacagagttttcccaggggcctagggattagggcctggaccccaggctggggtcccagggtctggacattagggttggcctggagccctgggggccgcttacctcagggggcttgcccaggtgctgggacaggacgatgaggttgaccagcgtctctgggtagccactatcctggagacacaggcagacacggggaggcagggtcagccactccagcccccatgcctgcccgtcacccccacctcaggcagcaccacacaaggtcacctcctcagaggtggggtgggactgacaccgcccaccgctctgcaaggtggagatctcagatgatacggtgccaaggggccagccgcctcgctgagcctcagtttccccatctgtagtccagcctggggtacgaccccttgtttacagagacttgggaaggttgtatttgtcccacacatctcaaagccatggggcccagacccagatggcctcaactcctgctgtacaacgaaccccgaggccatgggcagacctgccacccctgcaccagctcccaaggagccttgaaggagacctcggcaggggaccttgcctgactcactcactctaggctcccagcacacaggaccctaggaaacatctaggccaggagacccagccagagccctggtgtctgcttggagcacagacacaccaacgaggatgcgcccagagcccgacctgcccacggcggcccatggcagggcacctttttgcagaccggacttttctgagcctcagtctccaccatgaagggggacaccagcttgcgctcacaggagcagccatgaggtggctccaaagggaagtggggggacctgagtgcctcccaaaacccagcaagaatgcagggtgaccacagccacggggaggccaccagggccaaggggcacggccagccagccccaggtggtgtttcaagagacaaggacagaagggagtcatctaactggtgagtcacggaacgtgtcacctgagaggtgtaacaaaagcccccagaggatgcggccatgaacacaacatgcatccaagtgttctcaggtggcagggaggggcagggtggtggaggagggcgccagtcttgcccctggggcagcgagggacacacagcctgtctgagattgcacatcaggctgggagttcctgactagccctgactgctcagagctaaagatggaccctgctcaggaggagcagtacccggcctgtgatggggccagcctgataccccttggccagccccgctctgcaaacaactttctgatgataactcagcccctggaaagtcagacagggaggagggcttcaccagtgtttgtcactagattaaaactgtttctcagctgggcgcactggcgcatgtctatcatcccagcactttagaaggccaaggagggtgagaattgtttgagcccaggagttcaagactaacctggacaacacagtgagaccccatttctaacaaaaaatacaaaaattagccacgcatggtggcataccgtttcaaaaaacaaacaaaaaaccccccaaaattcgtttctccaaaatggaaaaagctttgatgtcctttctgattataaaaataataatccaggctgggcacagtggctcacgcctgtaatccagtactttgggagtccaaggtgggcagcatcatgaggtcaggagattgagaccatcctggctaacacagcaaaaccccatctctactaaaaatacaaaaaattagctgggcatggtggtgggcgcctgtagtcccagctactcgggaggctgaggcaggagaatggcatgaacccaggaggcagagcttgcagtgagccgagatcacaccactgcactccagcctgggcgacagagcaagactccatctcaaaaaaaaaaaaaaaaaaaatccaccaagcatggtggctcacacctataatcctaatgctttgggaggctgaggtgggacgatcacttgaggccaggagttcgagaccaacctgggcaacacagcaagaacaaccccgtctttacaaaatatatatatatttttaatttaacataacataaactcttcataaagactgcagatggccaggcgtggtggctcacgcctataatcccagcactttgggaggctgaggcgggtggatcacctgaggtcaggagtttgagaccagcctgaccaacatggcaaaaccccgtctctactaaaaatacaaaaattagccaggcgtggtggcagccgcctgtaatcccagctacttgggaggctgaggcaaaagaatcacttgaacccaggaggcggaggttgcattgagctgagatcacaccactgcactgcagcctgggtgacagagtgagactccatctcaaaaaaaaaaaaaaagaagaaaggaaaggaaggaaaggaaggaaaggaaggaaaggaaaggaaggaaaggaaggaaaggaaggaaaggaaggaaggaaggaagggaaagaaggaaggaaggaaggaaggaaggaaggaaggaaggaaggaaggaaggaaggaagaaaagactgcagacatcaggcaggagatgactgcagccaccctgggcaggcagcgctctctcaacgaagagctcctgtccacagcacactctcccctacataagtacggggagtgtctctccaatactgagtatgtactcaggtgaggggtcccacttgcaggtcccgggccaggcagctgaggtgacaacaaggacggctcagaccactgaggcccaggctgcccagatgccccatttctgtgaggccggaatctggatttctttgcaggtgagatccctgctttgtggatctcgctgctgactgggccttagaagccctgtggggccacacgcacacccagggggtctctgctacacttgtttctgtccgccctgaccccaccctctggccgcctggccttccctccgtccccactctgggacaggcttgtgcctaccttgtctagcgcctcctgcagcaggccctcagcggcctcccagcggccctgggccatgtggcaggccgcctgcccattgagcagcagcagggtgggcgagcacttgtcagccatctcctggaagatgtagtaggcatcctgcagcttctcaccaccctgcagggagggtcccgcatcattgcctgtgcccctgctgcccggcccttcccccgccagccccctcccctagcgggggggactccagcactgcacagagacgaatctggtgtgcccggttcaaggcacagccactccgccatggggactacccgtaacttgtactctgctgatggggcctaaagactcgtggccgcctcctgccccacctcccacccagctcccggagtgctgagtacacagaggtggaatctggggcttccaaggcctcagtgcacaggtggctggctcagggtctgagtggggaccactgggtcactgagcacgtcagaggaggaggagtcagctctgtgaccagcagccctgacctgtccacttgctcagaacagcagaacacttgcagggggagcctgaggccaaggcaggcagtgaaaacagcccaaactacccgataggtctgccggggcctgtcctaccatactagacggtcactggaagtctgtctgggtgaggcttcagccccgtggcgggcagggacggggagcacatttttttttctttctcagagtttcactcttgttgctcaggcaggagtgcactggcgcgatcttggctcaccgcaacctccacctcccgggttcaagcgattctcctgcctcagcctcctgagtagctgggtttacaggtgcatggcaccaagcccagctaattttgtatttttggtaaagatggggtttctccatgttggtcaggctggtctagaactcccaacctcacatgatccacccgcctcggcctcccgaagtgctgggattacaggcgtgagccactgcgaccagccaggaagcacattttaataggcccacacaaaagagtggctcagaagggggccaagtcccagaaaccaggagaggggctgttgccgggcggaggtgcccaggcctgggagctgaggacatctccaccgctgctatgggaacactgaactccgtccctggctggcgaccaggaccctggagagcaaagctgagtcgcagaaaaccccaggaagccctgaggggaggagggcctgccaggccaacccagaccctcgagtacccctgtgcctcaggctcaggaacccgtccccgcccccaccatctcttcgctctggctctggccaagtcgcttggctgtgagaagcccggaatggagtcaaggctgagttatgccaggctggcaggggccacggcctgatcctggagccccactggagtggccagcagcctacgcacaggtgggggtgcccacagaccctgctcagccaggtgcccgcaatgcccacccacctcatggcctagggctcaccgtggccaggctgacccaggcagtggcgagctgggtgagggtggcatcctcgtccaggtcctgcattctcttcagctccttcctggggcggggacagatgacagaggggctgagtggccgagggccctggcctggccatccctgccttgtccccacttggggcccaccggagcctggggatggcccctgctttgtgctccactgcatgctcataccccacgactaagtgcccgagccaccctgcccgtctgaccacgtgcaggccctgggaaggtgggactggggccagctatggccccccagggtggccaccacaaggtagagctcaggagagactcactccatggaggatggaacgcagggaagggcaacggaactacagtgtgaacaactctgaggcaagggctttggaaacggcagcaggggagtcctggacccccagccatggcctccgacctggtgatgccacgtgcaggccccgccagccccacggcacagttacaagctggtcaagtaacatgttgctccaggcacaacctccactctccctccatgaagcccaccctcaccctgtgggagaggcctgccacccactgcatagagagaaactgaggcacagagagccatggccctcctccctggcaacatactgcagggaagggctgaacgacagcaagccacccccatggaaaggaaagacaacaagagtaatgacagcaccacagacgctctgggctgtgacgctctgggctgtgacgctctgggctgtggctcagtgcgggtggagaggggcaggagggctcaccgggcgaggtccaggcggtccagcttcagcaggatctgcactgtcatggctgtgctgcaggacagggcgagggggcggtcagcgggtcgccacagacacattgcatggccgctccacacccagggctcactgtgtgtgtctgggatgttcctaagtcctgtgcttaggaccaccagccccgcccagcagaggaggacaccctcactcccacatttcaccgctcagcttcctcaggcccaggagctctgggggaggtacccaggatggggtttcaggccccggcccactcaccgcccatctggagaagcagcctccatgggctgtgcttccagatggagggccctgcccggactcgacaccctggaggcatcaacactcaggaacaaggccctagaggagggccacgcacccgcccctgcacctgcacctgcagcagagccctggggccacccactctctgcaggccccctcgtcccctcatccctctcagccccaggtggctgtgaccacgaattactcgtgaggcctcttgttcttgttttcctgccaacaggagccagcacctggaccagcaccgagtcggccggctcgccgacagtgtgacatccctatttattttcttttttgtgtgtgagtcagggtctggctctgccacccaggctggagtgcagtggcaccatcacggctcactgcagcctccacctcccagactcaagggatactcctgcttccgcctcccaagtagctggaaacataggtgcatgtcaccatgcctggctcgccctgcaattctaagccctctgtggatggaggtgggatgggagcagatccacagcgaccatgaaatgcccagcttgcaactcacagtggaaggcaggcactgcagggacagctcacggggaagaactgacacactttctgtgaccagtgccctggacatggcccggagtcacatcctagggtggaggggggcaccaaccttgcagggcttcagcaccccaaccccagagggccctggaggagggccggtatggggggcccggggaggcctgagagactgggcccagggccgagacacagaaggcttcgtggggggtggggacacagaaaccgagcagagacaaagccgctttctgctctgcccttgggaacagagggttgcagcctgggcaccgtgtccttggatctgcagcctggtgcgcagatgggagtgcctcccacactgggcaggggagctggagcctggacagcaggccagggcctcatttcagcaccacctttctctgctcccatgacgacagccagcgaggccgtgcgcagcctggagatgtggcagggggcacttgcctccctgggctggccccagagcagggaggccactcaccactccaggctgtccccctggtgcagcgcacgcagggcggcatccgggttctggtcgtggagatagatggaggcggccatgagcaggaaggtggtgttggtcacgtccacgctcctgctcatctctcggtccagctcggccacgatgctgtccctgcaagacagagatgctcacgacccacagctggggtggcctctgtgggacctcagagggtccccttccttggaagcagacaggtccagagagggtgagccaggccctgggggtgcagagcagcagcaggccgagcatcgagctgtcccgacatgtcctccctccgttcctatgaagcacctctcatgctgggccaggcaaggacccgaggccgggagatgtggggtggggcgctccaaggggacatgaggaggcaccgtcagtctcacaccaacctcacccgccttcctgaggaggctggtgggcccagctgggactcctgaccataacccatcaaccctgtgggcttcaaggccacgtcttctagcaggaggtcggcctgggtgccgaggggccgtgcagaaggatgggagccctggggcacccccactgccagggcagctgccctcagtccctgagagcccagggtgctggctgcaccctgaagatggccagtgtgctgcgggccagggccaggcttgagcccaggcaaggctgaggaccggctcagctccgagggcacaggtcacccatgcctccatgtccctaactggacccagaccctccattccccatggctattgagcagctaaaaagagaaggcaggtgagggggccaccctagaccaaagctggtgttcttctgggttcaaacgtggctctgtgaccccgtaagcatccacgcgcatctgggggctgtctgcccagggcccgtgtctgaggtgtcactgagggcatggcatgtctgataccaaccaggctccactgagggctcgccacagtgccaggtccaacagacaagtgacttcaggtctgagtctgtttccccgtgctgagggaccatgttacagggatcatgcaggggaggagcaaggagctcccaagaccatcttacaaagcttcctgaggctccagcacacaagggtgtataaacactgccagttgtcgtagcgttggtactgtaatgttgtcatcctaaggtgttacaattaccaatggggccgggtactgtggctcacacctgtaaccccagcgctttgggaggccaaggcaggatcgcttaagcccaggagttcaagaccaccctgggcaacatagtaggacccctttttctacaaaaaagtaagaaagtcagctgggcctggtggcgcctgtagtcccaactacttgggaggctgaggcaggaggatggcttcagcccgggaggttgaagctgcggtgagctgtggtcacacctctgcactccagcctgggtgacagagggagaccatctcaaaaacaagcaacagcaacaaaatcaattactgggcggatcgcttgagcccaggagtttgagaccagcctgggcaacatggcaaaaccccatctctctttttttttttttgagacggagtctcgcactttcgcccaggctggagtgcagtggtgcgatcttggctcactgcaagctccgcctcccgggttcatgccattctcccgcctcagcctcccgagtagctgggactacaggcacccgccaccatgcccggctaattttttttgtatttttagtagagatggggtttcacgtgttagccaggatggtctccatctcctgacctcgtgatccgcccgcctcggcctcccaaagtgctgggattacaggtgtgagccactgcgcccggccaggcaaaaccccatctctaaaaaatatacaaattagccaggcatggtgatgcgtgcctgtagtcccagctattcgggaggctgaggtgggatgatcacttgagcctgggagatcaaggctgcagtaagccaagattgtgccactgtatgccaggctgaacgacagagcaagaccgtatctcaagaaaacaaaatcaaaaccaaaaccaattactaatggatgctccttgtccccggggcgtcctgccaatgaggtcgcggctgtgcagccagatgaacggaccacaagcccctgcctggaccgcctgctctccggggctgcttttctgtgatgctcacagcagctgctgctcctgggggacccagggttccctgccttcactccagctggtgaagtaagtgcagggtgggagaaacagtggccctgggaggtcacctgtctcaatgtcctggagctgctgtggcaaagcaccacagcccgggcagttaaggacaacagggattcgttcctcacagctctggaggccgtaagtctgaagtcaaggtggcggcagggctggctccagctggaggctggagggcaaggccgtcccaggcctctctcccagctctggtggctgctggccactcgtggtgctccttggctagcagacatgtcactccagtctgttgtcacatgggcttaactctgtgggcctctttcctttttttttttttttttttaagacagtctcccgctgtcacccaggctggagtgcactagtgcgatcttggctcactgcaacctctgcctgccaggttcaagcgattctcctgcctcagcctcccaagtagctggaatcacagacatcacatcctgttaattctgtatttttaatagaaatggggtttcaccacgttggccaggctggtcttgaaaactcctgacctcaggtgatctgcccacctcgtcctcccaaagtgctgggattacaagtatgagccactgcacccagccctccttttatctcttaaaaggacacaagtccttggctttggggcccaccctaaatccagcatgtcttcatctccttatctcttaatctgatcggcaaagaccctttttccaaatgatatcatattcacaagcatgtgggataggatatggacgtaccttttgggggacaccattcaccccaccatgctgcctctgcacaggagtcagctcccaggaaccccaggtttctttgagtgaagggaggcggtagttgggacactgcctccgtgggccaaggaagagcaggatcacagcagtctccccatgccagaccctcactccgaccccacagcaggagggggcaaggttcctgggtccccacagcccagccccctctccccttggctgccgcccatgggcgtttgaccaacgctggcctgtggctcaggggcaggacaggcgtggcctcacccaccctcccactgggctccaggggagatactggcaggttgcagtccccaactagctgggactagaaaactgataggatttgggaggctgaggtgggcagaccgcctgagctcaggagttcgagaccaccctgggcaacacggtgaaacccagtctctgctaaaatacaaaaattagctggacgtggtggcacgcagctatagtcgtagctactcaggaggctgaggcacaagaatcacttgaacccaggaggcagaggttgcagtgagccgagatctcaccactgcaactccagcctggtgacagagtgagactccatctctaaataaataaataagaaaactgatgggagggccctgcccccgctgcgccctgggctgtcttggggctctgggtgttgcagagggctgctcggtaattgatattttcagttctaggttcagagagtgccttgtggtccatgagggcgtgtgcacacacagcactgtctctgaccctcccctttgaagcaggatccatcaccagccccccactgctgtgcaggtgagggaaactgaggcacaaagcagcaggggagcagaggggagaggcgcctaatctgagggatgctgtgcgctgcacgccatgcccccacccacccaggttcataaccaacaggccttgaagatggccccgcgcctcaggccaacccattctctggggcctcacctccgactctcgtgggcgaggtagtcagcaaacatgcgcacggcctggagctcaggggccgaggagggcttgatctcatccaggaccacaccgaacttcctctgcagtagggacgaggcgtcagctgcacccgtccaccccagaggatttccatgtcttcagcttggcagggagagccccagacaggaagtccctgccccaccagggacccctcagcccagcatgggccacctccactgcagtacactgtggagggtggcatggcgtcacctgtcgtgagcagccaggtgtgccctcatctgcagggccacactgcccatgccttgagctagggaccctggtaggttactgtctatcccctggcagctgtccacctctggtggtgaggtgaagggcgtgtcacctgggggcagggcagcagcagttatgggggttgtgacatgcgcttctataaagcaggacatgcccccagccagccctgcccacctactggccctctgaggatgcccagactgataccactgtcacatctgcagctgggggcccgtccctcattgtgttccctcctagatggttccttccccatttttttttttttcgagacggagtctcgctctgtcgcccaggctggagtgcagtggcgtgatctcggctcactgcaagctccacctcccaggttcacaccattctcctgcctcagcctcccgagtagctgagactacaggcgcccgccaccacgcccggctaatttttttgtatttttagtagagacggggtttcactgtgttagccaggatggtctcaatctcctgaccttgtgatccacccaccttggcctcccaaaatgctgggattacaggtgtgagccaccacgcccggccttttttttttttttttgagatggagtttcgctcttggtgcccaggctggagtgtaatgctgtgacctcagctcaccgaaacctctgcctcccaggttcaagtaattctcctgcctcagcctcccaagtagctgggattacaggcatgcaccaccacacctggctaattctgtatttttagtagagacagggtttctccatgttgaggctggtctcgaactcctgacctcaggtgatctgcccgccttggcctcccaaagtgctgggattacaggcgtgaaccaccgggcccagcccccattcttatttttttagagacaaggtcttgctatgttgtccaggctggagtgcaatggcgtgatcacggctcactgtaatcttgacctcctgggctcaactgatcctcctgccacagcctcccaattagctgggactccaggcacatgccaccatgactgtcttattttttaatttttttttgtagagacgggggtctcactatgttgcccaggctggtcttgaactcctggcttcaagtgatcctcccacctcagcctcccaaagattacaggtgtgagccactgtgcctggctcctaccaattattttaggaaaaaaaaaaaaatcggctgggcgcgttggctcacgcctgtaatctcagcactttgggaggctgaggcaggtggatcatgaagtcaggagttcaagaccaccctggctaatgtggtgaaaccacgtgtttattaaaaatataaaaattagccaggcgtggtggcgcacgcctgtagtcccagctacttgggaggctgagacaggagaatcacttgaacccaggagacggaggttgcagtgagctgagatcgagtacgacagagtgagactccgtctcaaaaaaaaaaaaaaaaaaatcaagaagctgtgacccaggccccctggcctggcagtctcaggcctccgtgacacagccaccttcacatgctggctgcgctggctgttcacagtcactgaacactgcaggcctgggtccctgctttgtttactgtccccgccacccactctgtggtgccttcctgtccccagccccaccctctactctgttcatcactcttgcccccggccaaggcccgcactcacctgcgccaggtacgctctatacaggaagacgtccctctccacgtctctctctgggcttgatagctgtgggaaccaatgtgagtcaggacgcacagtgggaggcccagcgcagcccacacagggtgagcatgacagacaggcccctgtacactggggacaggtggcttctccggcagggttggaggtctgagtcccagccctgatcctccgtagcccgagtggcctctgctgggggtaccctacacggggggtgcctgatctcatcccgcgctgacaccaccccaggaaggaggcttgctcccaagttcagtgtctgccccagtcacacttaagaagccagggtggcacccgcacctctaacctctggacatggggccactgtggcttgattctgttctgcttttgtctcaagacattttgagctcagtttggctgccccagtgtggtgacatctgtgcccagccctggccaggggagaccctgggaatggctctgtacttgggccacacccccacagcccagccattgcacagaactgaggagcaagagggaggtaacctgtggcaacatccattttgggatgataatgaagctgcccctgagcccaggccagggagggaggctgggaccgctctccagaacacagctttgcatgctgcccccggaggctggctgacttcccagggtgcccatggcaggtgggcacagtgcagctcagcccatggcctgagggtgctcgcccaggcccctgggggcttcgagaggaaagtacagttgggaaggggcccagccaccttggcatcgccactccaacaacctctaaacagaggggactgagaaggctgtcagcaagagggcctgccagctgtcaaggcacagggtcaaaggacccagtgcccaaaccagggggagtcactctgccctgtcctctgaagccgagaaccacagattccaagccacatctcttccttctccccagcctgagggaggagcgtggatgtcaaacgtgtcctcatcccaggccgccgcagacctggccccagcctgactcaggctgccattgccaagaggacccagcagcttctgctcaggccctggtagccagagtgggtatctggctatgatttggaacaagatgccatctaaataaataactcctagaagaatgtcaaaggcatgcggagggtggtggctgcagaaatcgagccccacctgcaaatgggatggacaggtgaaatatgtaccttttcaagtatgcaaagaaacatattataggccgggcatggtagctcatgcctgtaatcccagcactttgggaggccgaagtgggtggatcattagaggtcaggagttccagaccagcctggccaacatggtgaaaccccgcctctacttaaaaatacaaaaattagccaggtgtggtggcgggcgcctataatcccagctactcaggaggctgaggcaagagaatcacttgaacccgggagatagaggctgtagtaagccgagatcacgccattgcactccagcctaggtgacagagcaagactccatctcaataaaaaataaataagtaactctcaatcaaccttctgaggtggacttcagttaggtgactagcccagggccacatgccaccctcagttaaaaaagacaggccaggtgtggtggctcacacctgtaaacccagtgctttgggaggccaaagcaggagcactgcttgagcccaggagtttgagaccagcataggcaacatagcaaaaagcatagtcttttttttttttttttttttgatggagtcttgctctgtcacccaggttggagtgcagtggcgtgtatctcggctcactacaacctctgccgcctgggttcaagagatttttctgcctcagtctcccgagtagccgcgactatatgtatttttagtagagatggggtttcaccatattggccaggctggtcttgaactcctgaccttgtgaaccagccgcctcggcctcccaaagtgctgggattacaggcatgagccaccgtgcccggtctgagaccctgtgtccataaaaaaattataaatattagccaggtgtggtagcatgcacctgtagtcccagcgactcaggaggttcatgaaggaggatcgcttgagcctgggaggtcgaggctacagtggactatgatcatgccactgcactgcactctggcctgggtgacagagtgagaccctgtctatctttagggaaaaaaaagagacaaaagctggctgttgggctttcaaagtgaggacacagtggggcgccatcgggggcaccagggtggcctcagccgcccctgtgtgaaatgcaggtgcccaggagactgtgcgtgcggaagtgctcagaggctgcagagtgcactggagagacaagagtgccgggaagcataacaacaacaaatgtgcagaccgtgaccctgacgtgaggctctggaaccgttgtggttttcctcgacttccagggacgatcctaccatcaggacgcatgtgtgtccccggggtgggagagcattgctcttcaaccccaagggctcactacgatcacctgggagcccaggaaccaccaaagccaggaggccacatccaccaaggtcacctggccctaggatggccccagcactggccccaggtggcttaagatgtggccatggttgaggaatcagggtactgtttgggaaggcgggtgacaggatgggggccctgtagccagaaaccttgggggtagtaactcctcccttctgtccctgtagccagtgatctgaccgcactgggccgtcagcaactcaaggcctatgagctgcttcaaccccaacagctgggcggtgcctgccatcttgtgggcaaactggcaaatgtcagaaacccagaaacgtcatgatggtagcctagtgctgggggcagcaaagggcaaagactgccaggtgctctccctggggccacctcaggtggggctgaggttgctcaggccactgtcatgaactaccacagaccagatggcttaaaaaatgtattcctcaaaaattagccaggtgtggtggcgcacgcctgtaatcccacctactcgggaggctgaggcaggagaatcgcttgaacccaggaggcagaggttgtggtgagctgagatcatgccactacactccagcctgggcaacagagcaagactccatctcaaaaacaaaaaaacaaaaattagctgggcgtggtggcaggcacctgtaatcccagctactctgaaggctgaggcaggagaatggtgtgaacccaggaggcggaggatgcagtgagctgagattgtgccactgcactccagcctgggtgacagagttagactctgtctcaaaaaaaaaaagtattcctggccaggcgtggtggctcacacctgtaatcccagcactgtgggaggctgaggcgggcagatcacttgaggtcaagagttcgagatcagcctgaccaacatgataaaaccctgtctctactaaaaatacaaaaattaggccaggaacggtaactcatgcctataatcccagcactttgggaggctgaggcaggcggatcatgaggtcaggagttacagacgagcctggccaacacagtgaaaccccatcactaggaaaaatacaaaaattagctgggtgtggtggcacacgcctgtagtcccagctactagggaggctgaggcaggagaactgcttgaacccgggaggcagaggttgtggtgagctgagatcgtgccactgcactccagcctgggcaacagggcaagactccatctcaaaaacaaaaaaacaaaaaaaaaattagctgggtgtggtggtgggcacctgtaatcctagccacttgggaggctgaggcaggacaatcgcttgaacccaggaggaggaggatgccactgcactccagcctgggtgacacagagtgagatcctgtctcaaaaaaaaaaaaaaaaaaaaaaaaagtattccttcacagtcacagtcctggaggccagaagtcccaaatcaaggtgtcagcagggccacactccttccaaaggctctaggggaggatacttccctgcctctcccagcttttggtgactgttacattcctcagtttgtagccacattactcccatctctgcttccatcatctctgtgtctcaaatctccctctgcctttttttttttctttttccagtggcgggttctggtgaagacaagaaagcctactagaaacattctttttttctttttttttttttttttttgagatagggtctcacttttgacatagtaagagcaccaacatctcagacaaacactgccactttaagttccagccccctttctagcctcatgaattttaaggaaatttcttttttctttttttttaatagagaagtctcgctcttgttccccaggcttgaatgcaatggctggatcttggctcactgcaacctccacctcctgggttcaaacgattctcctgcctctgcctcccaagtagctgggattaaggtgcctgccaccatgcccggctaatttttgtattttttagtagagacggggtttcaccaagttggtcaggctggtctcgaactcctgacctcaggtgatccgcccgcctcccaaagtgctggaattacaggtgtgaaccaccgcgcccggccaggaaatcacttctaactacaagcagccagaaagaggagacagtaaaacacagaaagacagctcggacagagagagagtgggaagaaaatttcttgggtaactgccaaacttcaccttcatacaacgggccccagtaaaacagtgggccttaataagcacattcctttcccttcaggtgcactaaaataggcaagctaaaagcagagtaggggggtatgcctgcagctgcagaaagatgtatgggaggctgggcacggtggctcacacctgtaatcccaacactttggtaggccaaggcgggcagatcacaaggtcaagagatggagaccatcctggccaacatggtgaaaccccgtctctactaaaaatacaaaaattagccgggccatggtggcgcgcgcctgtaatcccagctactcgagaggctgagaaaggagaattgcttgaacctgggggcggaggttgcagtgagccgagatcacgccactgcactccagcctggcaacagcgcgagtctccatctcaaaaaaaaaaaaaaaagaaaagaaaagaaaagaaaaaagaaagatgtatgggaacagacacacaactctccctcccagataagcacaacgaagagacacagaagcagttcaagcctctgataaactctccgaccctgaatccttaaaaactcttagtctgtaaaagagtgttactctgacccaactccgccagaaggcgcctctcaggtttgttttctctaaaataaacctgtcttgactggcaagccacctttcgtgtttctttcctctttaattcttacaactttgtcacccaggctggagtgcagtggcgcgatctcggttcactgcaacctcggcctccgggttgaagcgattctcctgtctcagcctcccggtagctgagattacaagtgcccgccaccacgcccggctaatttttggtagactcatggtttctccacgttgcccaagctggtctcgaactcctgggcgcatgcgatctgcccgcctcggcctcccaaagcgccagaattacaggcgtttgagccactgcgctgggaaactgtgtttatcattctgagtccagcggaatacagtgcccgtccaaaaaagtgctcaatgaagaatgaatgaatgaatgggtaagctctgggagaaataaccaggctggttgggcagggaaacgtccttctctgaactttagggttctcatccgtaaaatgaggataagcaacagtctccatctcacgggaactgaaggtatggctgaacaaaataggcttattgtcactacagtggcataaacacctcccttactcaaaacactttcaagggcgcagagagaacgctgtacgagtgagcagtaccgtaaactgttactgctctgggttctgtcacgggacagtgactactcctcactgaactgtggaagaggtggcccaaaaaacgcgagaagaaaagagaaagtttttagacgcagaacgcggctcgcggccaccagaaagcgtcctccgcctccgcccccagcgtccccgcgcccctgcgcggccgcaccttcacccgctgcgcctcgtttatgcactgctggtagctgccgatgtagaaggcgttctttacgtcgaacagctcgtctacctccccggagccgccggaggccgggccgggggccggaggcgccatttcgctgtcttctcaccagctcctcttcctgaaagacacgtcagccggaagcaagacacgggcacgctaggaaatgtagtttactttttccgagcggcggcgaagtaagccaatgggaagctccacaataatatgcaagggggcggaaggcgtaagtgcgtcacggagagcatctcgggaattgtagtgtgtttctgcaagccaatgggatccggggaaacatgataaggatgcggtcgaggctgggaataggctgagggagctggagagggtgggaccacgcaggaggcagatccaataaacaggaagatttttctcgtgacgtcgtcggcgcgcgccggaagcgcggatcacacgggcccctacaaggggcccctacaagcggccacaaggatggcaggcttcgcggagctcgggctgtcatcgtggctcgtggaacaatgtcggcagctgggtttgaagcagcccacgcccgtgcagctcggctgcatccccgccatcctggagggtgagtatggcccagggccttccccaagaggcctctccgctcctctcgactcctttcccttctcgcaacctttgcttattccggtcccacgaggcgaggggcaacctcgggcgttacaggagatccggggttccggaggacgactggacagtgttggcatttaggttgcatgactgactcgctttgtgttcgtacgcaagtgatgtaatctctgaaattttcatagtctcagcacagggagggtttgatggatgactagtccgatagtatcgcaaaatcctgcagacctggtactgctatctttattttacaaatagaagttgaggctgtcaaaattgctggtagatccaggactccttggtcctgtgattgctcctctaggagaaggtcttctctctgctcctctagcccaacccagtttcgccattaaagagaggcccacaggaagcctaagatgtgataagtcagggattaaataaacaaatgaaggggtcaacagggagcacaagatgcatatgagggaagggaattctggattccccaaattcacgtgctcctggacggagttagaacgaggtggtaggaagctgtgggcatctcgggtcaaatggatatgggttccagtccagcctgccactcactggcagtgtgtcctgggcaaggtctctgaaacccagctgtccacacatggagggtgttgatgctgctttgtccccaacccaggtcgagactgcttgggctgtgctaagacaggcagtgggaagacagcagcgtttgtccttcccatcttgcagaagctgtctgaggatccctatggcatcttctgcctcgtcctgacacccaccaggtaagcccccagcaggcctcctgggtatgggttaaccagctgtgctctcttgggcaagcacctttccctctctgagcgcccttttcccacgtgtgagatgagcatgaaaatcttgctacccgcttcttaggggtcctgcagaattaaacaagatggccccggtgcagtggctcacacctgtaatcccagcactttgggagctccaggtgagcggatcacttgaggccaggagtttgagaccagcctgaccaacatggagaaaccccgtctctactaaaaatacaaaaaattagctgggcatggtagcgcatgccgtaatcccagctactcgggaggccgaggcaggagaatcgcttgaacccaggaggcggaggttgcggtgagccaagatcgtgccattgcactccagcctgggcaacaagagcaaaactctgtctcaaaaaaaaaaaaaagaaagaaagaaagaggcaggcagcagaaagggtactgggacctgggcatattggagccagtttgagaaaggccttgaatgccaggcggagggttagaattgattctgggggtgtgtgagcaggaaaggtcatgagccagggagaggccaggacagagttggttgggggcagaaaggaggctgatgcttgagaccctctggctggggcaactggctggtggtgaggccattgctgaaaggcgaactgggggaaggcacaggtttgggataggaagagatgctgaggtcagcttgggtcgggctggtgaaggagggatgttccaggctgagcctggcgagggggcaggggccacaatggcctccaaggctcagcatcagagcctttgtgaacaggactgggcaagtcaggagcctgggggctcagggaggaaccctggggatggagaggggaatggggggcaggtccagaaccactacctgacccagcctggccccttcacacccacagggagctggcctaccagatcgcagagcagttccgggtcctggggaagcctctagggctgaaagactgcatcatcgtcggtggcatgggtacgggagctgggaggcgggggaagccccagcatgggaccctagcagctttggaccacctgcccagccctgcctctcatgctctgtcccccagacatggtggcccaggcgctggagctctctcggaaaccacacgtggtcatcgccacgccggggcgcctggcagatcacctgcgcagctccaacacttttagtataaagaagatccgcttcctggtgagttcgccccgcccctgcagacctcaggagctgggctcggagcctccaggcccaatgtcagagcctggggcaccatctcatccatttaggaaacgtatgtccgttagactgtccagtaaaacgctaggaacagtgacaaggaccgttcaaggaccaacaagagggggcccagtcctagcaatgttattcgggggtagggccttgctgagacttgggtgaggggcaggcctcccttggaaggagggtactccagggcctagggtccatgtccatgcctctcaaagaggcctgcttcaggggtggccaagacccggggccatggacggcaccctcacccctgcccccattggcacggcaggtgatggatgaggcagaccggctgctggaacagggctgcactgacttcaccgtggacctggaggccatcctggcggctgtgccggcccgcaggcagacactgctgttcagcgccacgctgaccgacacactccgggagctgcagggtctggccaccaaccagcccttcttctgggaagcacaggccccgtgagtccacagcccagacagcgtggggagggcagccccatcctacagacagggacactgaggcgtggcggtctatctgtccatccccagggtgagcaccgtggagcagctggaccagcgctacctgctggtgcctgagaaggtcaaggacgcctacctggtccacctgatccagcgcttccaggatgagcacgaggactggtccattatcatcttcaccaacacgtgcaagtgagcggggcccgcctctcccctcccaccgcccttcaaaggaggaggtggcccgacgtctttggtctgggacacacagccagtctcagcactccccagcctctgctcagcctggaggtcatgggggcttccctcaaggagccaaggtccctcaatctgaaggtgcagccggcctttggggttcctcagcccagccgttgatggaagggccaggaaacccctgcaagcagctgtttgagcagcccatttgctgtgttctgggggtgtcactgagctttcctgggcctttagtcccatctcagaggaagttgtgacaactaacaggcctggtgtgcgtctgcacagacagagacccctggggagggcagttcatatcttcattgaattgtttgggaaggtcattgagaagctggaggctcttccagcatgagccaggatagaagggcagaaatcaaggcgctttaaatgcgttacctcccagaagagaaaagttgggactgggtgcagtgactcacacctgtaatcccagcactttgggaggccgaggtaggcggatcacctgaggtcaggagttcgagaccagcctgcccaacgtggtgaaacttcatctcgactaaaaatacaaaaattagccaggcatggtggcgagcacctgtagtcccagctactggggaaggtgaggcgggagaatcacttgaacccggtaggtggaggttacagtgagccgagatcacgccactgcactccatcctgggggacaaagtgagactgtctcagggaaaaagagagaaaagtttggctgcagggtggctgtcaggcgtggcaggatccagcagcttatgtgatggtccccatcctttctccctgtgcccctctttctcctctgttttcctctgctggctccttcttggccttcttggtaacagtgaccacccctagcaagtcagtttccagccttccagccctgcagtcccagggccaactcttgtcagttccagctccagggagggatcagcagagaggacatcaggcaggcaagccgtctgtcaaccctcatcctgcctcttttttttttttttttttttgagagtctcacgctgtcccccaggctggagtgcaatggcgcaatctcggctcactgcaacctctgtctcctgggttcaaacaattctcctgcctcagcctcctgagtagctgaggctacagtcatacaccatcatgcccggctaatttttgtgtttttagtacagatggggttttgccatgttgggcaggctggtcttgaactcctggcctcaagtgatccacccgcctcagtctcccaaagtgctgggattacaggcatgagccaccgtgcctggcctgctgcctctcctttctaagctgcatgaggccactgtgctaggtgtctcaggggcgggtgggggcaggaacaccttcccagaacctgagagctggaggggttgacaggcacatccttcccgccaggacctgccagattctgtgcatgatgctgcgcaaattcagcttccccaccgtggctctgcactccatgatgaagcaggtgaggccaccctggggcccgccagcctcaccctgggataccttccccgcctcagacattggccccgatccttccttctgccgggcgccttcttcctgccacctggtctcttctggtcccagaatatcgcagctcaagaggccctccctgaccgcatctcttttagccgtcattcatttgtcccggtctgacttctcatggccaccttcctcaatggacggctggggactgtcccggcctccaccctgtcccgaggcctcacacagaaaaccctgccttcatgcattcccaattttcttcccaaccctgtgcagaaagaacgctttgccgccctagccaagttcaagtccagcatctaccggatcctgatcgcaacagacgtggcctcccggtgagcagcccccagtctcctgccaagggcactccctcttttactacaaggccccacagatgagaaggctggcctcaggcatgtcaggcagccctagcatccctgctgagtgaccctgggtgagtccttgcctcggtttccccacatggacagtggagctgaccagccacctctgcctccaggggcctggacatccctacggtacaggtggtcatcaaccacaacacccccgggctccccaagatctacatccaccgagtcggccggacggcccgtgcaggtgagcagtggagggggaggccgagccttgggcctctgtccctccagcctgcccagcaaattcaggtggtaggacgtgggtagggtgcagcccacagatgagagctactcagggccatgtttgcaagttggggagttgtcctttctaaagcaaaggtgaatcccagctactcgggaggctgaggcaagaagatcacttgaacccgggaggttgcggcaagctgagaatgcactattgcaccccagcctgggcaaaaagagcaaaactctgtctccaaaaaaataaaataaaataggccaggtgcggtggctcacgcctgtaatcttagcactttgggaggccgaggtgggtggatcacgaggtcaggagttcgagaccagcctggccaacatagtgaaacactgtcttactaaaaatacaaaaaaattagccaggcgtggtggagggtgcctgtaatcccagctactcgggaggctgaggcaggagaattgcttgaacccgggaagcggaggttgcaatgagtggagatcgcacaattgcactccagcctgagcaacagtgtaagactctgtctcaaaaaataataataaactaaaataagtaaataaaataaaattgtaaaataaagcaaatgcaagtcaggtgctgccttcacccaagccaggtgatgaactgagcagtgtggggctgccccctgggagggtgcacacacagctccggcccccactacttgctgctgcctcgtcagggaggggcatggtgtccatgagatgctgtcagttctgaagccaggaaagatgtggttgctggggtcggactgggcctggaccttctatcctgaccctgtggtgctgggcaggtcacttccactccctagacctcacatggtggataatgagaatggtgacgtcctcgtggggctgccatgagggtcacggaccttgtccaccatcagtgcagtttcggccctagtcaacgtcacagaaaacagcaagcagagatcttgggctgaggcccgtcagggctaatggctggcattacttagactgggttccctggcagccaagccaaaaagggaaatcgggcagtaactaactgctgtgtaaggccagactggcagacctgcctctccccagcgacccgtcctccacacagtggtcctgcttggggtcaagcccagacactctgggctgatccctcccaagcccaagcccttgttcagcatctccaggacccctgagctgtgtagctgtcaggatctacctttattcgccccatgtcctgacgcccagcacatagcagataaccggcacatccccacagggcggcagggtcaggccatcacgctggtgacacagtacgacatccacctggtgcacgccatcgaggagcagatcagtgagtggggttggggtgggtggtagagaaggaggggtggggtgggcagaggtgggcacctcggggtgagacccattttcccgtcagacaccagccggcctgctcccgtgagcagatttaggctggggcttccttccctaggcacccccaaaagaagttcttttgcccatttattgaaacaaactccccatagttgtcgccagcagctgaaagccacatcagtcaggaggggacttgggtttcttagactgagatgtatggaaggtccctgagatgtcagaggccccattgacagggcctggcctgctaaaaacccctgggaatggtttcatatgcagccaagacagagacacttcctaaggtatctctgatcactgcatagactgtcctgaaatttagaaacatctggacttggccaggcacagtggctcacacttgtaatcctagcactttgagaggccgaggtgggcggatcacttgagcccaggagttcaagaccaacctgggcaacatggtgaaaccccgtctctactaaaaatacaaaaattagccaggtgtggtggcgcacgcctgtaattgcagctacttgggagggtgaggcatgagaattacttgaacccgggaggcaaaggttgcagtgagccaaggtcgcgccattacgctccagcctgggtgacagtgagactctgtctcaaaaaaaaaaaaaaaaaaaaaaagagaaacatctggactttaaggccgggcacggtggctcacacctgtaatcccagcactttgggaggccaaggtgggtggatcacttgagcccaggagtttgagatcagcctgggcaatgtggagaaaccctgcctctccaaaaaatatagaaactagcagcacacgcccgtagttccaactactcaagaggctgaggttggaagattgcttgagcggaggctacagtgacctgattgagccaccacgctccagcatgggcgacagagtaagaccctgtcttcaaaaaaaaagaaagaaatatctggactttaaaggacactgtttgcaagaaattaatattcatggttaaactcataatgctgctaacaccgaaaaaaaatggcggggggaggctgaggcatgagaattacttgaacccgggaggcggatgttgcagtgagccgagatagtgccactgcactccagcttgggtgaccgtgagactctgaaagacagcggtccataccttccttacctcagaaatccctgatcttgctcagctgacccttacctgatatggccccagatggccttgcataccccacagcatggggaactcactacttggctgaactccctctccatgtcacgtctcctccccacccccacccccggctttgctgtccccacagagaagaagctggaggagttctccgtggaagaggccgaggtgctacagatcctcacacaggtcaacgtggtgcgaagagagtgtgagatcgtgagtgtcagaggcgggcaggaactaaagtgctctccagggccgggggtgctcccttccaggtggggcccccgtgaccagcatctccttaccccacttccctccaccagaaactggaggcggcccactttgacgaaaagaaggagatcaacaaacggaagcagctgatcctggaggggaaggtgagggccgagcccgcaggtagggggtgggtggccaggttccctggcgggggccgccagctcagccatcccctggtcctccctgtgccaggaccctgacctggaggccaagcgcaaggctgagctggccaagatcaagcagaagaaccggcgcttcaaggagaaggtggaggagacgctgaagcgacagaaggctggcagggctggccacaaggggcgtccacccaggacaccgtctgggtcccactcaggcccagtcccctcccagggcctggtctgagccccacacggccatctgcccagtccttgactcgtccatggagctgagggtcggaggaaccttccttgggggcagcagcccttcccgggggcctacccagtgccccacagcagaacccgtgggcgctcgtgttgtgcgggccctgctcctctgccccgaaaccactggctggtcccttccctgagccctggccaagattcaggctgcaggggaagaaagaacatgaccgggaggttgtgaccccaacccaaggtcaccccccaggggtgccgcatacaggaggtgcttaataaacgggtcttttgacttcctcagtctgactttcgaagagcagggggacaggagaggtggggtgcagccgctgttgtttctcaggtgtctgcccagaacaccatgtccatttccaccaggcaggcccaaagttttgcagacaccagctgctcgaatggccatgggattttgggccctgaagccccttctctgggcttccagtttcctcatctggagaatgggcatagcaactgccctgctctccagaggcagctgtgaggctttggtgaggtcagtcctgtgccgaatgggtgcagctataagcttccctggccacccacctggccacatctggggtttgtggccagagtgaaggggccatgaaagtccaaatttggccagacaatgtgggctaagcccaaggggacaggcagagagacaccagagccagcttcctggctgtgtggcctggacccccctcggactccaagcctcacccctcatctgcaagcggcttataactgctacatggattcaggggcacccaaaaagacgcagggaaaggcgccggcgacatgttaagtgcccagatacccacataccacacacacacagccacgcttagaaatgtaatcgggggatctagaaattctacacaatgagaagctcaaaaacagccccaaagctgccaacaaccagagccgactggggcccaccccagcccagcccggcccggcccacccagggctaagttgggaccccccagtccctttccaggacgaatgggcccaactatgccgcctgcagcctggcccgcatcccaggccggaatcgttcatagaaaaccagccccggctcagggcgcagcctcagccaggcgggccaggccctcacgcagctcactcagctcaaacaggctgacgtccagcagctgcgctgcccggcccacctcagcccgcgcccgctcccgctctgcccgtgcctcctccaggctgcgctccatcgcccgcagctggtgctccaactccgcattgcgggtctccaggtcctgccaggaaagggtgggcagggttgggggccccaacaaatcaccagtcctgcccgaggcatccagagtctgaccaccttcatgtccctcttctgcccagagccatcctagggcgcccaacacaccaggaataaaatgcacaccccacaggggcctagcttctgccctcatttcttttgtttgtttgtttgtttttgagaaggagtttcgctcttgtcgcccaggctggagtgcaatggcgtgatctcggctcactacaacctccgcctcccaggttcaagcaattctcctgcctcagcctcccaagtagctgggattacaggcatacaccaccacgcccagtgatggcttacacctgtaatcccagaactttgggaggcggaggcaggtggatcccctgaggtcaggagttcaagaccagcttggccaacatggtaaaactccatctctactaaaaatacaaaaattagctgggcatggtggtgcacacctgtagtcccagctactctggaggctgaggcaggagaatcgcttgagctcagaaggcggagcttgcagtgagccgagatcgcgccactgcactccagcctgggtgacagagtgagactccatctcaaaaaaaaaaaaaaaaggctgggcgcagtggtttacgcctataatcccagcactttgggaggccgaggcgagtggatcataaggtcaagagatcgagactatcctggctaacatggtgaaaccccgtctctaccaaaaaatacaaaaaattagccgggcatggtggcgagcacctgtagttccagctactcgggaggctgaggcaggagaatggagtgaacctgggaggcggagcttgcgccactgcactccagcctgggcaacagagtgagactccgtctcaaaaaaaaaaaaaagtaccccctgaacatttctcagataaagcctttagcaaaagccaagccaaggccagtcgtggtgactcaagcctataatcccagcactttgggaggctgagggcagattgctcacggtcaggagttcgagaccagtctggccaacatgaggaaaccccatctctactaaaaacacaaaaaatgcccgggcacggtggcgcatgtctgtaatcccagcactttgggaggccgaggcgggcaaatcatgagatcaggagttgagaccagcctggccaacatggtgaaaccctgtctctactaaaaatacaaaaaattagctgggtgtagtggcgggcgcctgtaatcccagctactcaggaggctgaggcaggagaattgcttcaacccgggaggtggaggttgcagtgagctgagatcgtgccattgcactccagcctgggcaacagagcgagactccatctcaaagaattaaaaaaaaataaagccaagccaagccagacctagttccaatgcaggctctgtgatctcaggctgagaacaggaggaattgacggggtctggcatgggaatacagcaggaactcaagcattgcttgttgaacccatagatggatatgaaactgtaccaacagccactgttcacgcggcacctgctgggcatcaggccttccacaggactgggcctcccaatactttatcatcttaggtagatattgtcctgagtgtctgttgaggtgactgtcacccaccgtcaccccacctccttgtgcccacacacacctgcaccttctgctgagtctcctcacgctcggcagcctccagggcctcgcggggccccccagtctgactcttcagggtctgaatctcctagaggagaagagttcccagggtctgttgcgggggtcctggctttcccacaggaggtgagggaaggcgaggcccaggaaccacacttggcactcacctggtccttggtttgcaccagagcttccagctgttccagcgactggccctggcccagcccctccttctcaccggtgggggtcacctctgaagctgcctgagcctccagctcagccacctgtagggcaggaatagcagcccctgacgcccccgcctgcactctcccttgctcgcccaacctctagggaatctgcctcctgtctggccacgcccaggaccgagcacccatctcccttggttggtgccaccacccccctctgcacagcttggactttagtgtctgatcaccctctgaggctggcattgtctcaaacccattttacagagcaagaaactgaggctgggtcagtgacctgctgaggtcacacagctagtccatgaacccagggcagatgggaactgccgaggcgcggtctccacagttgcccgggccaggtgggggtctctcggagggaggggtgccctcacccgctgccgcagccgctcggcctctgcacgctgagcctccagctgctgcctccactgggctgcggcggcgttggcctctcgcagggcgcctgccagcttgttgttgctgtcctgcagtgcgaaaaactcggcctcccactgtacctcgcccacggagctgcagagacacgagggtcggcagtgggtgacacggggctggggggcggagtcgggcgatgctgggctagggggcggggccaggggtgggatagctctgggcttaggtcagggcgaaggctggcgagggtgcggagtcgtgcgcgaagttggactagggggcggggcaggggtggagtggcactgggctgggggcggagtcagcggcaatgctcggttagggggcggggccagggtgggtggcgctgggctgaggcggagtcacgggcgatgctgggctagggggcggggccagaggaggggtggctttgggctagggcacggagtcagggccacgcagggctggggatgtggcgacactgattgctgagcttggggatggggcagtcccgcagaagcggggtcttgtcgaggaccgagtcaaagaagggggcacgtggagtccgcccagtgacactgtgggaatgttgagggagggatgggaggttggggagagtcagccgatgggggcgtggtcagggtggttatcctaagaccagagaggcatcgacggggcgaggttagcagcgagaagagacagggatggggtcaaaacagaggggcgtggccaacgcagggtaggggcggggtcggctctggatggggcagcattcagatcctcatccccttccccaggtcttgagtccacagttagatcccgccgtcctggcactcccttggcttccaagaaccgcctcctcgtcccccacccctacccccgcccctgccacgcccccaagtcccgcccctcacccctcagacaacatcttctttagccgctcgcgctctgtggggccgggggcatcagcgctctggctgcggaacagtttttcctcgccggggccgttggcactgacgagagggctcgggggcacctaggcacggggaaaagaataggtcacgaccccacatcagctgggatcaaggctgatgtgactggggtcgtcacatcgggggtgcaattgacctatgcaccctaagcaggtccttcacagcacaggatccaagtgtgtccctccccacctcacccaccctccatggctccctgtggcccctaagctgggagttccatgcccacgccctcgaccttgccttcctgggctttcaccacccccaggagcaagtctgatgcaggttagtctaaaccaagatacttagaacctgtaaggtaggggaggggtacaatcggacacctccctgctgttcccttccctgaggccgaacttcaacatcacgtttaggatttcagcaggaagccctgcccaggccgaattcgtgtttcgtgagcaaccccactgcctggaccactggctctgagggtagacaagctggcgggtgccctgcgagaggccagcgccaccgcagcccagtgcaggcagcagctggaggctcatgctttttttcatctctccaacccctgtgcacagccctcggcctggtacacagcaggtgctcaataaataatgctgaataaattaatgtgggaaaacacgcagggacagttcgttgttctgcctcacacttagccatttctttctttctttttttttttgagacagagtcacactctgtcacccaggctggagtgcagtggcacgatctcggctcactgcaacctccatctcctgggttcaagcgattctcctgcctcagcctcccgagtagctgggactacaggcgcatgccaccacgcctggctaatttttgtattttttagcagaggtggagtatcaccatgttggccaggctggtctcgaactcttggcctcaagtcatcctccctcctcagcctcccaaattgctgggattacaggcgtgagccaccgcacccggccacacttagccatttcaatttctagtcttccatcctgccatctgagctggttttgctactgggacctactgggtgtaccccaccggccccaggcaaggtccagaccctctatgacacactccacaccactcctctgtggtccctgctgtgggtctaaccttaggtcatctggaagcattgggtcttgacgaccagcagagtgccccggtctcccaatatcaaggtcccccaatatcagttgagcgcctggctgactcacaggtgcccaggcaggcataggggagtagggagtgctgacctggtgggaggcgagccccagggctggactggtgagctccccgccatcctgagatttctccctggccagcctggctgcttccttcacttcctggaacttctcggcaaactaagggagtggggaggaaaagacagtaaaaccccagcccatcctcccaaacaggtcaccatcactcagtgacagccccgccactttcgaaccgtacccatccccttatcacacaccttggaagaaggagagaaactttgaaaaatgatgtaccatggtgggtgggcaggtggcatcagatcacagaggtggcatttaaatacattgggccacattgagaaagggaaaggaattcccatgtcctctttttaggaaagggtctcactttgtcacccaggctgcagtacagtggcatgatctcggctcactgcagccttgacctccctggctcaagtgacccttccaccttacccctccaccaaggagctgggactacaggtgtgtgccatcatgcccggctaattttttctagagacggggtctagccatgttccccagaatggcccttttcctgttttttgttttttttttttttgagatggagtcttgctctgttgcccaggctggagtgcagtgacatgatcttggctcacggcagcctctgcttcagcctcatgagtagctgggattacaggcatgcaccagcatgcctggctaattttcatatttttagtagagatgtggttttaccatgttggccaggctgatcttaaattcccggcttgaagtgatccgcctgcctcagcctcccaaagtggtgggattacaggcacagcacccagccttttttttttttttttttggggggggacagaatctcgctttgtcaccctggctggagtgcagtggcaccatctcagctcactgcaacctctgcctcccaggttcaagcgagtcttctgcctcaacctcccgagtagctaggactacaggcccgtgccaccacgcccagctaatttttgtatttagtacagatggggtttcaccatattggccatgctggtctcgaactcctgaccccgtgatccacccacctcggcctcccaaagtgtgagaatgacaggtatgagccaacatgtggggtcccttttaatctttatcagggctatttcaacaaagagagcctcaggtgggtgctaatctgtctttaacacctgttattattcctttataacaaagagattaggtctcaggctctgagagacatcagaagtcaatgagaaagtaatcatctcattcttgtttttgttgtattaaatgtttacatgtttacatttaccacctatttatgacaaagcaataccagttttccagttaggataggatatgtttccccccaccaccccggttttaaaataaatttccttagtttaaaaataattttttaggccgggtgcggtggctcacacctgtaatcccagcactttgggagaccaaggcgggcggatcatttgaggtcaggagttcgaaaccagcctggccaacatggtgaaaccccatctctactaaaaacacaaaaattagccaggcatggtggtgggcgcctgtaatcctagtacttgggaggctgaggcaggagaattgcttgagcccaggaggtggaggttgcagtgagctgagattgtgccattgcactccagcctgggtgacagagcaaaactctgtctcaaaataaatagataaggccatgtgtggtggctcacgcttgtaatcccagcactttgggaggccgaggcaggtggatcatgaggtcaggagttcaagagcaggctgaccaacatggtgaaaccccatgtctactaaaaatacaaaatcagccaggcatggtggcacatgactgtaatcccagctacttgggaggctgaggaaggagaattgcttgaaccggggaggcggaagttgcggtgagccgagatcgcaccattgcactccagcctgggggacaagagtgaaactctgtctcaaaaaaataaataaataaataaataaataaatgattttttaggctgggtgcagtggctcacacctgtaatcccatcactttgggagcctgaggcaggcggattacctgaagtcaggagtttgagaccagcctggccaacatagtgaaaccctgtctctgctaagaatacaaaaattaaaaaaacaaaaattttgtaaaaatacaaaaattagccaggtgtggtgtgtctgtaatcccaactacttgggaagctgaggcaggagaattgcttgaacctggagagaagaggttgcagtgagccgagatcgggccactgcactccagcctggcaacagagctagactctgtctccaaaaaaaaaaaaaagacctaaattagaaaggtaaattgttggggccgggcgcggtggctcacacctgtaatcccagcactttgggaggccaaggtgggtggatcacgaggtcaggagatcgagaccatcctggctaacacggtgaaacccccgtctctattaaaaatacaaaaaaaattagcagggcgtggtggcaggcgcctgtagtcccagctactagggaggctgaggcagaagaatcagaagaatggtgtgaacctgggaggcagagcttgcagtgagccaagatcgcgccactgcactccagcctgtgcgacagagcgagactccgtctcaaaaaaaaaaaaaaaagtaaattgtctgggtgcagtggctcaagcctgtaatcccagcactttaggaggccaaagtgagaggctcgcttgaggccaggagtcaagaacagcctggacaacatagtgagatcctatctctaaaaaaaataagattaaagatattagctaggcatggtggcatacgcctatagtctcagctagtcaggaggctgaggtgggaggatcccttgtgcccaggagtttgaggctgcagtgagccatgattgcactgcttcactccagcctggacagcagagcaagatcttgttaaaaaaaaaaaaaaaaagaagggagggagggagggaaaaaaaaagaagaaaggtaaattctaaaccttctagaagaaaacaaagaaagcctggtgtggtagctcatgcctgtaatcccagcactttgggaggccgaggcaggtggatcatctgaggtcaggagttcaagaccaccctggccaacaaaatcccatctccactaaaaatacaaaaattagctgggcgaggtggtgggcacctgtaatcccagctactccagaggctgaggcaggagaatcgcttgaacccgggaggtggaggttgcagtgagccgagatcgtgccactgcactccagcctgggggacagagcaaggcattatctccaaaaaaaaaaaaaaaaaaagaagaagatcttcgtgaaagcactcatcatcaacaaaaccacggataaagataataatggaagtatagagacggcacagggtgcagggaggtgaggatgaaggtattgctggggcatgtgggaaagtgcccagcccagcccagccacccatttgatgtcccaaagaggagcagggtgtgtccaaaattagagctacaggcagtagaactaggactcaagagcaggtacagtggctcatgcctgtaattgcagcactttgggaggccgaggcaggcagatcatttcaggtcaggagttcgagaccagcctggccaacatggtgaaaccctgtctctaataaaatacaaaaaattagctgggcgtggtggcggactcctgtagtcccagctactcaggaggctgaggcaggagaatcgcttgaacccgggaggcggaggttgcgtgagccaagatcactgcagcctatctcaaaaaaaaaacagaaaaatgaactaggaatcaaaccggggaagcttaaaggggcttcagtctcaactcatcctacaatcccatcctgcagatgggaagataggggacctgcccaagatcccagagtgagcccaggagaagacttgggcccagtctcatcggttccctccactctccccctcacccggcccacctgtgtcagatgctgttcagaggcaaagcccaggccgtagactgtgttggcgcgactgtcggcccactgcccgaacttctgggaagttttggtgaaggtcatgttgggagtgacagtgctgttgatgatggcctagggtcggggaacaaagttcaaggtagatgggacagatactaacaaacatgaaaccccccaggtattaccttgtattagggtcttgaaggtctttactctgaaccctttcaggagatagagactagggcctgggaaggcttagggtttcctgtcccttgggcacacagcaagccagccaccagacccaaggttgtcaccaggactcctggtgcctctgccccacccagaccccaccctgaccttggcgcctccgatgctgatgatgcggtacacattgcgggtggcatcgtagaaataggagacagtgagtgcgtgcttgcccgctgggatccagtttcgcttggtggctgggtcaatttggaacacgtgcgcccgtgtgctgaagattggctgctccctgcgtggggagagggtgtttggtgggggccaggcacccccacttagaaagctcagggccaggctgggggaggtgggagctcacctggctgtggacattggtcaggctgggatgggcaggctctagggggcagccagagaggtggcaggagcactggtttggcccctagggagagaggagggactatgagtgtccctcaggccaggctgagggaggccaagcaggttccatctcaggacccatcaccaggtgtgcccgtcatggaactttcaatcaaaaaggcaggagaggcccaaagtacacctggtgctttgggaggctgagtcaggaggatcctttgagcccaggagttcgagaccatcctgagcaacatggcgagaccccatctctaccaaaaatttaaacaattagctgggtgtggtggcatgtgcctgccgtcccagctactggggaggctgaggtgggaggatcacttgagcccaggaggtcaaggctgcagtgcagtgagctatggtcaggccactgcactccagcctggacaagagagtgagaccctgtctcaaaaaagaaagaaattataaaaagaaacaaaaaggtaagataattattatagataactcagagcaagcagaccccatctttctttgtctaggggaagcccccacaacaccctgtacaggagatggccctctgagaggagcctggtggccgctgacatccagatgtaaatttctcattgtcctggttattgcacccccgtgaagtcccctccatcccaggctgagctgtggaggccaaatctctgctgagttctttccaccacattcacccatgactggccagagcggggctctccaccaaaaaatggggcgttgagaggtgtgtagtaccaggagaccagttccccactacaccctgcagagggaccccacccccagcagctcccaccctagggcagaagcacaccttgaagtccagagtccaaatccccagggagcccccagccaagttaaaaagacaagatgtagacaaacagccaatcccaatgcccaccatgagggcagagcagaatccacactgggagaccagggctccccaacctccccattgggccattcagcaaccccgaatctgcaggggaccaaggaggagtttggaggagggggaagacaggtgggggaggggaggccctggcccagcggcctctgtggtcaaaggggggatgccccccctatcctgtcctgggcagctgctgtcctggtcacagggtctgaaaccggagcccctgagtgggggtggggcggcagctctggcctggactgggggcgggtcctgcgccgggtgggagttggggaacacaggggtccccggaacccaggcccttccggtccggcagctcctgctgcgacttgcagcgtttggggaaagttactcaccaactagtcatgcgcctcggatgccgccggccacggggctcccggaggggggtccgacaccgcccggtgcccgggatccccaatctggccggtggatgaggccccatcccatgcacccgagtgcgggggacgggggggttaatattaattcaggatcccatccccacccgaggcaggacacccagtgcacgccccaactccgggacgcgggctctgaccctggaacttccgagattcccgcgacgccccctgtctctgggtccagaacttcgggggacacctcttctgcctcctccaaccccaggtcggtaactccggggactcccttcgtgactcctcctctaactgggtccgggaccccggtcctccgcgttgtcctagactcctaaacttcgaggaccccctgccacccctccagtccctgggtccgggacgtccggacccctcccaccccagtaccccaccccaggtccgcagctttggggacctcttcgcagcctcctccaacgccgggtccagaactttgggaacctcccacgcagtcccctctcagaccctgaatccagaacttcgggacccccgcgctccctccagccctggaacttggggacccctcgcgccgctcccagtcccgggtccgaaacttctggggaacccccacgccctccccttggccctgggacttcgaggcccccgcgctcccagcgcaggctcggcaggccgggctcaccctgccaggtcggcgccccgcgagtgtccaggcgcgagtcgggtgcggcccccgcggcgctgactccgcgctgccgggcgccccgctcgctccctggctcccgggcccgcgccctccgcgccgccctccacgccgcccgtgcctttgtctgcgccgccgccgcccgcgccgcctccggtcccatcgcggccggtcccgacgcggccgccgcccgccccgcctccccgggccgccaaggccgccccgctgcgccccctgccggctttttgcactgggagagggtatgggggaggggataagggggaggggcgggggccgggactggggaagggacggaggattgagggagggggttaggggcggtggagggggagtgggggggggggttgcgtggggtcgggttgggagcagagggtggggacagagagacagacggagagggacatctgggatgagaaagagacccagaaacagagacacgggggagacaggcggagagataggaagcagatggagagagttgcacggacagcgatgtgacctcaccctcctgtcaccttctcaggagacagctgcctctgtccccactacctgaggtcataactttgggcctgtgagggaggtcaggtccctcccgggctgacatgggtggcccagtgaggttggggagggggcagtgggtctcagggtctgcatacagtaagtgctcaatgggtgttgccaggaaacggaagagatcaacttcgggagggaacgggaagcaagacaaagagagagaagcctctgttcccctgcccgtcccatccctaagcagggacgtctgtccacctctgtccctcccaagacgatggtaaaaatgcccacaatggttggattaaggttatctttgctgttgtttgagggttccaaaatccaaaggctgaggaaatgtctccaacgcatggttgcatcccctcagcctccactggcctgcgtttgtcacctctggtcacagggagcacccccttcccacacttgccaggagagcatccttccggagttgaactaggatccacctccccagccccaagcccatgtgtcccacttgtcaatcctggtgccgccccctctctggcaccgtctccaaaatcacacggtgcggcgccgttggttcgtttgtggacagaggtcctgcagctccctggaaccaaggcctgtggcgccctaaagctctgatcttacatttgagtttttcttttcttttcttttcttttttttgagacaaagtctcactctgttgcccaggctggagtgcagtggcacaatctcggcttactgcagcctctgcctcccagattcaagcaattctcctgcctcagcctcccgagtagttgggactacaggtgcatgccaccacacctggctgatttttgtatttttagtagagatggggtttcaccatgttggccagtctggtctcgaactcctgacctcaagtgatctgcccccctcggcttcccaaagtcctgggattacagacgtgagccaccacacctggccgacacttgagtgttttgacaacttcagagaggcttttgcttttcatctccaagacctctgctcctgtctcctttccctgttcctttatttctgtttccttctaagaagaatagtatatctgagctggcggttacattacattcaaattacctttaggtgaattccaggtcaggttgtttttggagattgactcctgcgccaagatctgagtcttcccccatccaggcctttgcccaaactgttccttccacctggaatgccctcgctgcaggcatctcttctgccttgtccttccaggctcagcgccaccaccctgtctcctcctccaggaagcctctctgactaccctggccttggaagggatcttgccctcccctgtcccaatccctgtgactcttttttttttcttttttaaagtttatttttagagacgaggtctcactatgttgcccaggctggtctcaaactcctaagctcaagtgatcctcccacctcggcctcccaaagtgctgggatgacaggtgtgagcccagaccctttctgtgactcttatgttacctgtttattacatgaccaggtctgggtgctcctctagggctggcccatccatcctgaagccccagtctgacccagcacaagagcgactgttcatcccacaggggaaactgaggcacagactcggtttccctggctgcttctaacttcacgaggcatctgcacaagggaaggatttggctctgttctcaggccggaagccacgaaatgcttgaacattgtggggagcaaagaaaataccgtctgttctgtgcaaaaaatgacttttccttattaccaacaaaataatggaaaaaataaaaaagtatctgggaaaggtgctggcatggccaaggcttctggaagctgcttagagtttgccaagtgcacaagtggggccctgtggctattttacaggggcggctgggcgaggggcccaggcagactttgccctttgtgtgggcagaaagcaacagtgaaagagacagtgaagggttgagttgctttcctgaacaccctctccggtctctgggaggggctgggacagggctggccttgagcagccccaacctgaagctggactagccaagtctacactgaggcactggcttcctcagtgtgggcctcagttttctcacctggaaaatgggccgatgcttgcagggcttctagtagagggagaaacatgaaggatttagtcaatatcagcagctgtcctctggggtgcctgccattaggttcgtgggcaaaggccctgccactctttgctgcagctgggaaaacagagtctgtgtctcagtttccctgctgggatgaatagtcactcttatgctgggtcagactgaggcttcaggatggatgggccagccctagaggagcacctagacctggtcatataataaacaggtaacataagagtcacagaaaggggctgggctcatgcctgtcatcccagcactttgagaggccgaggctggaggatcgcttgagctcaggagttcgagaccagcctgggcaacatagtgagacctcgtctctaacgagggctgccctgagctgctgcccccaccccagtctgggccctcttcttcctaggtctggaggcctctcttctaaagaactgggctgggtgcagtggctcatgcctgtaatcctagcactttgagaggctgaggcaggcagatcacctgaggtcaggagtttgggaccagcctggtcaaaacatggtgaaaccccgtctctactgaaaatacaaaaattagccggacgtgatggtgcacacctgtaatcccagctactcgggaggctgaggcaggagaattgcttgaactcaggaggcagaggttgcagtgaactgagatcaggtgactgtactccagcctgggtgacagaaggagactctgtctcaaaaacaaaaacaaaaaagggtgggggggagggaggaaggaaggaaggaacagacttgagatgtccttgcagggcaggcagaggccaccccaaggtgtctgactaggaaagcaactttcctttggggctgaaaaatggtgtgggagaatgagcttcccaccttaaaggggaaaccaagcgggagcctgaacagctcattcagcactaagaaaactgcatttgcagaatggcttttatggctcaggctctggtctctgcctagttagatctgacctagcctttggagtgaggctaaacagtctctcctctccagagactttctgtgccaccagagcagggacagtccacctgctcttcccgaaagctgggtgcccacctcccagtgaaggtcttggtgactacttcaggtctgtttattgtttatggcatgatttggttactgttcacctcttacatggatttgtccctgcacctagaacaagcctgacctgtgacagctttctttttttttggagatggagtctcactctgtcgccaggctggagtgcagtggcacaatctcggctcactgcaaccttcaattcctgggttcaagctattcttctgcctcagcctcccgagtagctgggattacaggcactcgccaccacacccagctaatttttgtatttttttttttagtagagacaggatttcaccatgttggccaggatggtctcaatctcctgacttcgtgatccgcccgccttggcctcccaaagtgctgggattacagacgtgagccaccgcccttggcccctgtgacagctttctatgagcactttcaggagtaggagatccccaggttccagctttcgacttggctttcggaatcacgtgagccagggagtgaatcccagccctgctgcttaccagcagtgccaccctgaagaagtcactttcccttctttgtgcctcaggttccccatccataaaatgggcatacgaatggtgttcacttctgaggtttactgtagggatccaatgagttctttctttttcttttctttttttcttttgagacagaatcttgctctgtcacccaggctggagtgcagtggcgcaatctcggcttgctgcaatctctgccttccaggttcaagcaattcttctgcctcggcctccctagtagctgggattacaggcgcacgccaccacagccggctaaatttttgtgtttttagtagagacaggggtttcaccatgttggccaggctggtctccaactcctggactcaagtgatccacccgccttggcctcccaaactattgggattacagatgtgagccaccacgcccaccctttttctttcttttcttttcttttcttttttttttttttttgagacagggcctcactctgttgcccaggctgtagtgcagtggctcaatcatggctcactgcagcctcaactttctgggttcaagcaatccttccacctcagactcctgagtggctgagactacaggtgcacaccactacgcctggctaatttttgtattttttgtagagatggggtgtcactatgttgcccaggctggtctccaactcctggactcaagagatctgcctgcctcagcctctcaaagggctgggataacagatgtaagccactgcatctggcctccaatgagttgttatgtgaagagaacgtgattgtaggtgcttaataaatgcttgctgttataaacatcatatttatttttggtatgtggttttgatcctgaaccaacctcttactcttttctttttcagaagttagaggactccaaccaggcctgaactctcaaggacagaaatgggtccaacctggcatgacatcctctaaatctttagctcctggcctctcaggtgccccctccagctacctccctcttccttctcttcattccccaagccatagctggttgggccaacctccagacattagcctctttgcaaactcctattcatccctcaaagcctcaccttcaatgctctcctccccaagaagctctctcctctacctctagaccttttccagccctcttccctctttctggcccagccctgactcctgggagtgtctgtgtgcagctttgactcccccagcctgagtgtctctcaagggctgagaccagggcccatgtttccctagagtttgtcatcttccagcatagtgtggacgcatgggggtcaggcaaagggggagtttgatgactcagtactattggtgattttgcatcacttgaaggagaccctgccttaaattcagaacttgacttctgcccacggctaaagttaattcattcaacaaccccccatgaagcaatggagccaggctccctcaggcccaggcaagaaagggtcgtggagttggggtcgccagcactggtttatggatttgaggacctaggaccagagtgagttggggatgggaggaggcagtgcttgaggcccctctgagcagcaaacctggacccgaggttcagttcccgcagacctaattaccctaatttgccacatgcactaattacctcctgggtgccaggtggctgggcggggctgccccaatttccggaggtaggtcggggcccgattatttttggctgtggcgtccttgaagcctccgccatcagcagcgcttgaagggcagaaagtggggcggagaaattgaggccacatcaggggaggcactgcgggaattgggggtcggctggccttggagctccctgaacagggggccttgggcccaaggcctgagagtctttggcacctagccagaggtggcaagatctggaggggcatggccaggcacgatggctcacacctgtaatcccagcactttgggaggctgaggcaggtggatcacgaggtcaggagttcaacaccagcctggccaatgtggtgaaaccctgtctctattaaaaatataaaaaattagccgggcgtggtggtgcattcctgtagtcccagctactcaggaggctgaggcaagagaatcgcttgaacttgggaggcagaggttgcagtgagccgagatcgcgccactgtactctagcctgggcgggagagcgagactcttgtctcaaaaaaaaaaaaaaaaaaaaatctggaggggttgagaatcagccagctccatggtggattggtttgaagtctttttgttttgttttgagacagagtctcgctgtcatccaggccagagtgcagtggcacaatctcggctcactgcaatctccccctctcaggttcaagcaattctgctgcctcagcctcccgagtagctgggactacaggtgcgtgccgccacacccaactaattttttcatttttagtagagatggagtttcaccatgttggccaggctggtcttgaacacctaacttcaagtgatccgcctgcctgggcctcccaaattgctgggattacaggcgtgagacaccacgcccggcccaggtctgtttttgatgtgataccatggccgggaaaggggctgccagggggtgggagtgggggtagtcagatgggcctggtttcatatcccaagtcccaccagcttgctgtgtgttcctgggcatataacctttcatgaactctttgcacctttcctgagggatgaaacaggtgtaatttaaaaagggtgctttaggcactgggggtcggagcatgggcaaaggccctgaggtggggccaggcaggacatgttgctggtacattagacaggtgtctagagtggagtaagtgggagaaaagcttatgggactgctgagacctagggggtcacaggaactgagcagagccttgtgggtcttggtgagttgtgtgggtttcattctgaaggcactggggagccatggggagtttggagccagagagagagggagtggtcacattgacactgcaggccctgggcagggtttcagctcttaggaaagaacgaggtgtctgtccatgtgcagaatggtcgcagaccctaccattctctgagcctcagtttccccaccctgagcagagtcctgagactagggcagccccagaacacagtgagccctctgccggggaagccccactctaccctggagctcccaaatgctggctgtgcagcctacacggcctcctccccgcctgtccccccatcccacgctccttctgtggccttgggggagcagctgtgggaacagagagcagaagcccgtggggaaggcagctcagagggcctctgggggccgtgttcctgcttggtgacagcccacgtggggctgccgcgcgccgaatgttctcacagcagccaggtgactcacatgctacagcctcttccctgggtctgccagagggagagtattcctagtccccaggcacaggccggggtctctggtttggccacctgtgccctggctatgccctctaggatcccccccaccaacacacaccaagggacccctctaactggcgatgctgcccacctccttgctccagcatcttccgtggctctcctggacacctcagagagaggctcaagctcctcattgcccattggtcaagctgctcagccccacttcagagcacttgtactgggtcccacgtatggcctgaaatgccagctctaaggccatctcctccaggaagccttccagccctccccacaactctgacaatcctgacccccaggacgaggatgcgtctgtgtctggccctgcctccctcccagactgggggctaactggagtccaggcccaggacccaggcctctcaggggctccactgttatccagtataggagtgcacagcaggggctctgggggaggaaggcaaggtccaagtctggaccccatgggcctgacatgtaaccaaattatttatgtatttatttatttttatttatttattttttttgagacagagtctcactctgccacccaggctggagtgcagtggcgcgatctcggctcactgcaacctccatctgacaggttcaagcaattctcgtgcctccgcctcctgagtagctgggactacaggcacgtgccaccacacccggctaaattttttttgtatttttagtagagacggggtttcactgtgttagccacaatggtctcgatttcctgacctcgtgatccgcccgcctcggccttccaaagtgctgagattacaggcatgagccaccacgcccggcattaatttttattttttgagagacaaggtctaactctgccgcccaggctggagtgcagtggtgcgatctcagctcactgcagcctcagcctcttgggctcaagcgattctcctgcctcagcctcccgagtcactgggattagaggtgtgagccaccaagcctggctaattttttaatattttgtagagatggggtcttcctatgttgtccaagctgctctctaactcctgggctcaagcaatcctcctgccttagcctcccacagtgcggagattacaggcataagccactgcacctagctaacccatttcatagaagagaaaactgaggctcagggagcttgtcagttccccaaagtaaaagtcagcagaaggctggaggtggtagctcatgcctgtaatcccagctctttgggaggcggaggcaggctgctcacctgaggtcaggagttcaagaccagcctggccaacatggtgaaaccccatctctacaaaaatacaaaaaaatgggccggccatggtggctcatacctgtaatcccagcactttgggaggccgaggtgggcagatcacaaggtcaggagataaagaccatcctggctaacacggtgaaaccccgtctctactaaaaatacaaaaaattagccaggcatggtgacaggcgcctgtagccccagctactggggaggctgaggcaggagaatgatgtgaacccgagaggtggagcttgcagtgagccgagatcgtgccactgcactccagcctgggtgacagagcaagactccgtctcaaaaaaaaaaaaaaaaaagaaaaagaaaaaaataaccaggcatggtagctcatgcctatactcccagcactttgggaggccgaggtgggtgaatcacctgagatcaggagttcaagaccagcctgaccaacatggtgaaaccctgtctatactaaaaatacaaaaattagctcagtgtggtggcacacgcctgtagtcccagctactcgggaggctgcggcaggataatcacttgaacccttgaacccgggaggcagaggttgcagtgagccaagatcacgccattgcactccagcttgggtgaccgagtgagacttcatcttaaaaaaaaaaaaaaaaaggccgggcatggcggctcacgcctgtaatctcagcactttgggaagccgaggcgggtggatcacgaggtcaggagatcgaggccatcctgactaacacgatgaaaccccgtttctactaaaaatacaaaaaattagccgagcgtggtggcaggcgcctgtagtcccagctacttgggaagctgaggcaggagaatggcgtgaacctgggaggtggagcttgcagtgagccgagatcacgccactgcactccagcctgggcaacagagcgagactctgtctcaaaaaaaaaaaaaaaaaagtcaccaggaggctggaggtggtggctcattcctgtaatcccagcactttgggaggccaaaccaggcagatcacttgaggtcaggaattcgagaccggcctggccaacatggcaaaaacctgcctctagtaaaaacacaaaaagtaacccgggcatggtggtgtgcacctgtaaccccagctactcaggaggctgaggtgggagaattgcttgaacccaggagtcagaggttgcagtgagcccagatcacaccactccactccagcctggacgacagagtgagactttgtctcaaaacaacaacaacaaaaagtcagcagagaggaaaggctggtcctggaaccccagtctgagaggccaagtctgctccttgcaacctctggagctttgcttacccagggagcaggttggggggtttgctcatccacctgcaggtggatttggtgcagcctgggctcaaactcaaggggtccaacagcccttcctccctgagcctctgtttcctcctctgtaaagcaaggattattcatcattaactcatgtttattaagcacttaaggcatccaggtctgttaggacaccctgccctcagggacctcatgtctggtagacaagggaacgaggaaatgacttctgacaggattttgcaaaagaaagaaaaccaggcaaagcaccaggtcaagactgcagtggttgctgaaggctactttgtggaggtggtgattcagggcaatagcacgcccaaaggccctgaggcagggatgtgttcagccccttgggacagcattgaggaggcggctgtgactgaagcaaagtgagttgggcagagtggggagggcaccatgtaggcagggagggctacaggctgggcatcagggacctgtgggtccccaggaaggaatgcagactttatacttagagcactggggagccacataaggcttttgagcaggagagggcatgatctgctttttttttttttttttttagacaaggtctcacgctttcacccaggctgaagtgcagtggcgtgatcatggctcactgcagcttcgacctcctggtctcagatgatcctcccacctcagcctcccaggtagctgggactacaggtgtgcgccactatacccagttgtgatcttcttttgtgtttaaatatttgcagccgggtgcgatggctcatgtctgtaatcccagcactttgggaggccgaggcaggaggatcacttgagtccaggagttcgagaccagcctggccaacgtggtgaaaccctatctctactaaaaatacaaaaattagccaggtgtgatggtgcatgcctgtggtcccagctattcgggaggctgaggcaggaaaatcgcttgaacctgggaggtggaggttgcagtgagccgagatggcagcattgcacaacagtctgggaaatagcaagactgtctcaaaaaaaaaaaaaaaaaaaaagatttgcagccaggcacagtggctcacacctgtaatcccagggcctgagggaggaaacttgtcttcataaaccctttcccatcttcctctgtctctcacgaggtcctggatgctggcctccgggtcttatcgctgaaatctcaggcctccaacagcagggaaacatctgctttccggagttcaaggatcttccagcccggacggaggtcacagggaaggaggatcgctgaaacaaagagaaagggtcacacgttgggcgctgactgcatcaacaggggagacactggccaggtgcggtggctcactcctctaatcccagcactttgggaggccgaggtgggtggatcatttgaggtcaggagtttgagacaagcctggacaacatggtgaaaccctatctctactaaaaatacaaaaaaaaaaaattagccgggcattgtggcacacacctgtaatcccagctactcaggaggctgagtcaagagaatcgcttgaacctgggaggcggaggtttcagtgagccaagatcacgccactgcactccagcctgggtgacagagtgagactccacctcagaaaaataaaaacacacaaacaaaaattagccgggcgtggtggcacacatctgtagtcctaactactggggaggctgaaacaggacaactgcttgagcccaggaggtcaaggctgcagtgagctcaaattgcaccgctgcactctagcgtgggggacagagcgagacctgtcttgaaaaacaacaaagaaaaaaaaaaagaaaaacaacaaagaaacaaatcccaaagtcaatggggaccagagtctggggaagggtgtcagtacacccacatcttggggtcccccctaacaccttggggtccctcaggctttggcatctatcctgggacccaggagggatatagctgctggtggctgggccaagcccttggtggtaaccccactgttctggggggtaccatccagggaggtcatgaccagtagctgaggggttcctgcagggcccttccaggtggtaggtgctcaggagttggctgttaacaggtcaggagagtgagaaacagaaagaaacatagacatacagacttggagagcagttgcttgggggctggcctctcgcttctagatgagaccctctcctggggggccactcagagtccatctgggacaccacagccatgcccacatgcaaaacagacattgtgtaactggccagtgacctccaactcacatctgccagagccctccaccttctagcagtcacagggcccagggtgggtgttgagcagcatctggacctggctcgaaggcagctgtctggagtcctgtgggaggaggggctggcccttgaaaaggcacctggggagaccaggttggatacagggatgcaaggcacaggcgcactagggccactaccagtgtgacagtctacactgggctcttcgaagggtaggcggggtgcttagagagtgttggggctcaagctacacctttccacttcctcacatgttcatgcacccactcaatgcctatccatccatccacccacccatccacccacccatccactcattcgcccatccatccatccatccatccatccatccatccatccacccacccatctgcctgtccgtccatccatccatccatccatccatccacccacccacccagccatccatccatccatacacctatccatcttcccatccatccaaccatctatccgtccacccattcttccattcatccatccatccatccatccacccacccatccatccatccatacacctattcatctgcccatccatccactcatccacccacccatccatccatccatacacccatccatcttcccatccatccaaccatccatccatccacccatttacccatccatccacatatccacctacccatccatccattcacctatccatcttcccatccatccaaccatccatccacccacccatccacccatccacccatccatccatccacccacccatccatccatccatacacctatccatctgcccatccatccacccatccacccacccatccagccatccatacacccatccaccttcccaaccatccatccatccatccacccatccacccatccatccatccacccatccacccatccatccatccacccgcccatccatccatgcatacacccatccatctccccaaccatccaaccatccaatcatctatccatccacccattcatccatccatccatccatccatccatccatccattcatccatccatccacccacccatccatccatccatacacctatccatctgcccatccatccacccatccacccacccatccatccatccatccacccatccacccatccatccatctatccatccatccattcacccagccatcttcccatccatccaactatccattcatccatttactattcatttatctatctatacacccatccatccaaccatccaaccgtgtgtacactcatcttcccatatattcatccattcatcgatccattatttatccatccatctgcccatccatctgcccagtcacccatccagtcatttatcttccatcccccatccatccccatccatcccaccattcaccaatcccccattcctatcccatccatccatgcttccatccatccaccctcatatgcaggcatcatccatgatccacccaactctacttccacttctcatacttctactcattcttcaagccccaactccatgtgccttcctccttgcagcccttggtgtggcccagaccctccctgtcccttcctctcacccaggcccaacccatggagcgaagagtgaatgcacctggctcagctttcagactggaggctgctcgagagcaaggcctgaggccgaggtttcttgggggcccagcagcaccagtgtgagggggcgccgaggagaagaccagcaatttctgcctgtgggccattgaggcatcaggcctccaggtcaggggggataccaccccacccaccaataataaagcccctgtgatttaagcccaataaaaaggcccggggaaggaattcaggcttggcctgaggccactctggggtcagcaagagctccagcgacagatatatctgggtttgtgctccactttgtcacatgtgcactgtgtgacactgaagaggtcagtttacctctctgagcctcagttttcccatttggaaatcaatctgtctcatgttaattgcacatttacaaggagttgaggcccacatcaggccccatcagctgggatgtatcagctccactccaggggaggggccaggaggagctggggtgaggagaacaggaagggaggttgagaaggtggatggggccaggcgcagtggcttatgcctataatcccaacacttttggaggctgaggcagaaggatcatttggggccaggagcttgagaccagcctgccaacatagcgagaccccatatctacaaaatataaaaagattagctgggcatgatagtgtacaccagtggtcccagctactcgggaggttgaagtgggaggatggcttgagcctaggaggtcgtggctgcagtgagccgtgatggcgcctctgtattccagtctggatgacagagtgaaaccctatctcaaaaaaaaaaaaaaaaaaaaaaaaaggtggatggcactggtggggggatgggaggggtgtgggacataggtgtatgtttcctaatggattcagagttccatattttctttttcttttcttcctttttttttttttttgagatgaagtctcactctgtcacccaggctggaatgcaatgggatgacctcggctcattgcaacctccgcctctcaggttcaagcaattctcctgcctcagcctcccgagtagctgggattacaggcacgcgccatcacgcccaactaatttttttttttttttttgagacagggtcttgctctgtcgcagagctggagtgcagtggcatgatcttggctcactgcaacctctgcttcctgggttcaagcgtttctcctacctcagcctccccagtagctgggattacaggcactcactactatgcccagctatttttttttttttatgtatttttagtagagacggggtttcaccatgttggtcaggctggtcttgaactcctgacctcattttctgcccacctcggccttccaaagtgctgggattacaggcgtgagccaccacacccagccaatttttgtattttttagtagagacggggtttcactatgttggcgaggctggtctcgaactcctgacctcaaatgatctgtccgcctcagtcttctaaagtgctgggattacaggcatgagccaccgtgccggcctcttttctgattctccaaataatgtatgctcattgtaaaaacagttttagaaagcacagacacgtgtaacgtaaataatctaaataggtcccttgtcatagcgtttaatttcctttctgaatttttaatacctatttactttatgcctggtgcttattggtaaattttaaaatgctggcacaggaaacaaactaagtaaacaaattcagatgccatccttgcccttggccctagctgacacggaccaggtgctctgtaaatatctgttgagtgaacaaaattttaaaaataaaatcaatgcccagaaataactgttactaacacgatggtctatttccatctagattttttttctttctttcttttttttcttagcccaaatggaattacactatacacatgatttgtcagtcaaggccaaattccagtgtacattcttgagttcagagacttcagcatcactcaccttgaagcttttctatggtttgttaaacagatctcctatggttggacatctaggtcactctctggggacagcctaacaaatagaataacacattttcttttttttttttttttttctgagacagtctcactctgtcgcccaggatggagtacagtggcgcaatctcggctcactgcaacctccacttcctgggttcaagtgattctcctgcctcagcctcccaagtagctgggactacaggcacccaccaccacggccggctaagttttgtgtttttagtagagatggggttttaccatgttggccaggctggtctcaaattcctgacctcaagtgatcaccggcctcggcctcccaaagtgttgagtttacaggcatgagccaccgagcccagccaaacacacgttttcaagttttctccttctccttttcctttttttttttttttttgagacaggggtctcagtatgttgcccgtctggagtgcagtggctattcacaggtgtgatcccactactgatcagcacaagaattttacctactcagtttccaacctgggccggttcacctctccttaggcaacctggtggtggtctcccgctccctgggaggtcaccatattgacaccaaacttactgtagtcacccaattggcatagtgcactacagcccagaactcccggattcaagtgattcttccacctcagtctcctgagtagctgggactacaggcattcatccctgaacccagcttttcagcatttttgatgaatacttaagaccacatcaccttccatacaggggaccttacttggctcccagcagtgatgggtgagtgtgtccatttctctgaatgtctgacatttgcaaatgaatgttagagatatttgctttgcaagatgtagattaaaatcagaagccataaaccaggcatggcgcctcgtgcctataatcccagcactttgggaggcccaggatggaggatcgcttgagtccaggagttcgagaccagcctgggcaacacagcaagatcctgtctctaccaaaaaaaagtttttgtttttgtttttgtttttttgagacagagtctcactctgtcatctaggctggagtgcaatggcacaatcttggtttactgcaacctccgtctcccaggttcaagcgattctctcgcctctgccttatgagtagctgggactacaggcacgcacgaccatgtccgactaatttttgtatttttagtagagacggggtttcaccatgttggccaggctggtcttgaactcccgacctcaggtgatttcgcccacctccttggcctcccaaagtgctgggattgattacacacgtttccaaacagtggatcccacaagaaaagaaggtgtcatcgtaggtgacagaatggaggtccctgtctgagggagggaccgctgagcctcaagtgagtaggctacaaggctggcagggaggtcaccccatcctatggcctaagattgtccccaaacataaagcttgaaccctgaggccccttgattggtttccttggtccttggccagcatttaaactctcctttttttaaatttcttgagacagtttctcactccgtcacccaggctagagtgcagggcacaatctcggctcactgcaacctctgcctgttgggttcaagtgattctcctgtctcagcccccatgagtagctggggctacagacatgcgccaccatgccctgctaatttttgtatttttagtagtaacagggtttcaccatgttgatcaggctggtcttgaactcctgacctcaagtgatccacctgcctcggcctctcaaaggtgctgggattacaagggtgagccaccgtgcccagcctacactctcttgacaaaggtttttataaatcccaatttggctgggtgccgtggctcatgcttgtaatcccagtactttgggaggctggggccaggggatcacttgagcccaggagattgagaccagtctggggcaacatggcaaaacccatctctacaaaaaataaaataaaattagccaggcatggtggtgcatgcctgtggtccaagcttcttaggaggctgatgtgggaggatcgcttgagcccaggaattagaggctgcagtgagccatgattgtgccactgtactccagcctgggtgacacagtgagaccctgtctcggaaaataaataaataaaagactgtctgggccaggtgccgaggctcacgcctgtaatcccagcactttgggaggctgaggcgggcagattgcttgagcctggtagtttgagaccagactggccatcatagtgaaatcccatctctactaaaaataaaaaaattagttgggtgtggtggcgcacaccgatagtcccagctacttgggagactaaggtgggagaatcacttgagcctgggatcaaggctgcagtgagccgtgatcaacctctgcactccagcctgtgtgacagagtgaggctctgtttcaaaacaccaccaatgacaagaaaacccatgaccgtccgggcgcggtggctcgtgcctgtaatcccagcactttgtgaggccgaggtggatggatcctgagatcaggggtttgagaccagcctggccaacatggtgaaaccccatcaccactaaagatacaaaaaattagtcgggcgtggtggcacgtacctgaaatcccagctacgtaggaggctgaggtaggagaatcgcttgaacccgggaggtggaggttgcagtgagccgagatcgtgccattgcactctagtctgggcaacagagcaagactccgtctcaaaaaaaaaaaaaaaaagaaaatccatgagcactcagacctgcagccagtgaaggcaaggtagagatgggaccccacccttcagcctgtgtcttacatttttagggggctaatttaatttagaatgtccagcagggaagtgtgtctagctgtccagtgaggggagcctcaagctatcttcccacctcagcctcccaaaccactgggattacaggcatgagtcactgtacctggcctgaaggtcccttttacagataagaaaactgaggttcagggccggcttctgcccctgcccaacctgctggcttcttcctcagccagccctctccaactactgcctatttctttttttctttctttctctttttttgagacggagtctcgctctgtcaacaaggctggagtgcaatggcatgatctcggcttactgcaacctctgcctcccaggttcaagtgattctcctgcctcagcctcctgagtagctgggattacaggcatgcaccaccatgcccgcataatttttttttttttttttttttgagacggagtctcgctctgtctcccaagctggagtgcagtggcgcgatctcggctcactgcaagctccgcctcccgggttcacgccattctcctgcctcagcctcccgagtagctggggctacaggcgcccgccaccacaccgggctaattttgtttttgtatttttagtagagacggggtttcaccgtgttagccaggatggtcttgatctcctgacctcgtgatccgcccgccttggcctcccaaagtgctgggattacaggcgtgagccacagcgcccggctctttttttttttttttttgagacagagtctcactgttgcccaggctggagtgcagttgcgccatctcggctcactgcaacctccgcctcctgagttcaagcgattctcctgccttggcctccctagtaggtgggattacaggcgtgcacaaccatgccctgttaatgtttgtatttttagtagagacgggatttcaccatgttggccaggctggtctcgaactcctgacctcaggtgatccacccgcctcagcctcccaaagtgttggaattacaagtgtgagccatcatggccagccactactgcctatttctgcatctcctgttccagacaaacggaagaaacaaggccatttattgagcgccggtgatatgctgagcgctcaacctgcatcctcaaagatcgtcgatccaacagcctgctaggagtggatcaatcgagtcacagagggggctcgacccccactcactgtagagaggggaaagctgaggttcagaggtgaaacgatactcccggggtcacacggcaaggacatgtaggggcaggttttgggacgaggctattcctgcatccacggtatagaaagaaggcggggcgcaaaggtcagccggtgctagggaccagacagcggcccatagggaggagtggacttgggtccaggatgcgcctgatggggcggggctatctttattgggtgggcagtgcaggaccaggctgccccatcaggtggaagcggggcgaagtgcacctgtgcagagggtttgggggcgtggctagaggctgagatgcgccgggtgggctggggctggggctggggctgggcggagcgggcggctcagcactgcagcggaagagctttcttgctacacgcagttgaggctaagctaccagcaggatgaaaggatcctgctgtgggtgatcgtgcacaaataaggctgcgaggtcacgtcgtccatgcactgagagaaacgagaggacccccggcctcagctcctagtccagcaaatggaggcaccatccttgactcctgtctgtgcctgtctgcgcctcagcaagcctcagtctccatatctgtcgaatgggcatgccatccccgagatggaagggaccttttgtgcaccagagctggtcccttccttgtgcccccacagcctcagaataaagccaaacacctcacctgtccaccctcaactccctccaccatcccccttattcactgtactccagccacaggcttcccagttggtctttgcacagggcaacaacattaccgccccagagcctttgcatatgctatctgagccgcctactctcagttcttccctatgactaactgctcctttaggagtcgactaaatgctaccatcctggccaaaatagcctcccctctctgcagtttcaaatccatggagggagtggattttgggctaactggatactactacaaaaaatatacatatatatgcccggtgcagtggctcacgcctgtaatcccagcactttgggaggccgaagcaggcgaatcacctgaggtcaggagttcgagacccatctggccaacatggcaaaaccccatctctactaaaaatacaaataaattagccggctatggtggcacacgcctgtaatcccagctacttgggaggctgaggcaggggaatcgcttgaaccggcgaggcggaggttgcaatgagccaagatcgcgccactgcactctctgggggatagagcgagactctgtctccaaaaaaataaaataataattccaaatggacctgagatgtgaatatgcaccctgcgaacactagaagaggctatgtgcagccaggtgtagtggcgcatgcctgtaatcctagcattttgggagactgaggcaggtggatcacctgaggtcaggagttcgagaccagcctggccaacatggtgaaacactgtctctactaaaaatacaaaaacttagccggtcatgatggcaggtgcctgtaatcccagctactccagaggctgacccagaagaattgcttgaacccgggaggcagaggttgcagtgagccgaggtcgtgccactgtaccccagcctgggcaacaagagcaaaactccgtctcaaaaaagaataataataataagagggtatgtgtgcatttctgtaaggtctgggaagggaaagagctttcataatgatcaatcagagcccaggagcaacaatgggaaggacgtgtgtattcatacatgtatgtgtgtgtgtaagagtaaaataggccgggtgcggtggctcatgcctgtaatcccagcactttgggaggccgaggcaggcagatcacttgaggtcaggagttcgagaccagcctggccaacatggtaaaccctgtgtctactaaaaatacaaaaattagccaggcatgatggtgcgtgcctgtaatcccaggcactcaggaggctgaggcatgagaatcacttgaacccaggaggcggaggtttcagtgagccgagatcacgccattgcactccagcctgggggtcacagcgagactctgtctaaaatacaaaaaacaaaaaaagagtaaaataaaacctttggccaggcacagtggctcatgcctgaaatcccaaagcctttgaaggctgaggcaagaggatcacttgaggccaggagttcgagatgaacctgggcaatatagcaagactctgtctctacaaaaaataaaaaattaactaggcacattggtacgtgcctgtagtcccagctatgcgtgaagctgaggtaggaggatcacttgagcccaggagtttgaggttacagtgagctgtgattgtgccactgcaactgcactccagcctgggagacagagtgagaacctgtctcaaaataataataataggccaggcctggtggctcacgactgtaatcccagaactttgggaggttgaggtgggcggatcatgaggtcaggagttcaacaccagcctggcaaacatggtgaaacccagtctctactgaaaatacaaaaattagccaggcgtggtggcgggtgcctgtaaccccatctactggggaggctgaggcaggagaatcgtttgaacccgggaggcagaggttgcagtgagatgacatcacgccattgcacttcagcctgggcgataagagcgagactccgtctcaaaaaacaaaaaacaacaccaaaacaacaaacaacaacaacaacaacaacaaaataataataataataataatgcattgaacaatgatcatgagttttaaaaaatgaaaaaaaccaaaacaaaacaatgagctggggccaggtgctgtggctcatacctataatcccagcactttgggaggttgtggtcgtgatacaggagatagaaattattttggcagacagtgagggtaaaagagtcctgggaatttctcttttaacaaaaagcagccccccaaatcatttctttctttttttaatttttattttttgagacggagtttcgttcttgtcacccaggctgtagtgcagtggcacgatcttggctcactgcaacctctgcctccctggttcaagcaattctgtctcagcctcccgagtagctgggattacaggcgtgtgccaccatgcccggctaatttttgtatttttagtagagacggggtttcaccatgttggccaggctggtctcaaactactgacttcaggcgatccacccacctcggcctcccaaagtgctgggattacaggcgtgagacactgtgcccggccttcttttacgagatggagtctcactctgtcgcccaggctggagtggagtggtgcaatctcggctcactgatacctctgcctcccaggttcacgctactctcctgcctcagcctcccaagtagctaggattacaggcatgtgccaccatgcccagctaattttggtatttttagtagagatggggtttcactatgttggccaggctggtcttcaactcctgaccttgtgattcacccacctcggcctcccaaagttttgggattacaggcgtgagccaccgtgcccagccgcaactcatttcttttttcttttctttttttcttttttttttgagacagagtttagctctttttgcccaggctggattgcaacggcgcgagcttggctcaccgcaacctccgcctcccggcttcaagcgattctcctgcctcagcctcccgagcagctgggattacaggtgcctgccaccacacccggctaattttttgtatttttagcagagacagagtttcaccatgttggccaggatggtctcgatctcttgacctcgtgatctgcccaccttggcctcccaaagtgctgggattacaggagtgagccacagcgcccggccaactcatttcttttctaacaaaaaacagcctgaaaaatcgagctgcagacatggataagcaagtgggaagcttccaggggtgaataccagcagctgtgtcaatggaaaagggccacctgagggcctggcatgttcaacatgggggctccagcttcccttttttttggtcactacgtgtacagtaaagaaacaggttttagtttggctgggcacggtggctcatgcctgaaatcccagcactttgggaggctgaggcaggtggatcacctgaggtcaggagttcgagaccagcctggccaacatggcgaaaccccgtctctactaaaaatacaaaaattagccaggcatggtggtgggcgcctataatctcagctactcaggaagctgaggcaggagaatcgcgggaacccaggaggtagaggttgcagtaagccaagatcgagccactgcactccaacctgggcgacaaaaaaaaatgaacaggcaacatggcgccagccagctagagaactcatctgcataataaaagattaagaagccaggcgcagtggttcatgcctgtaatcacagcactttgggaggatgaggcagcagatcatgaggtcagagtttgagaccagcctggccaagagaccagcctggccaacatagtgaaaccccatctctactaaaaaaattagccgggcatggttgcaggcacctgtaatcccagctactcaggaggttgaggcaggagaattgcttgaaccagggaggcagaggttgcagtgagctgagatcgcaccattgcactccacctgggagactcaaaaaaaaaaaaaaaaaaagaaagaaaagaaagaaaaaaaagattaggatgggaaggccagcttttcacaccctatgcaaattacacacatagccttaaccaggtttttacaccctatgcaaatgaaacacctggtccaaccaatcttttgtgccctatggaaatcagacaccacctccttaagctcatccataaaactcactgctttttactgaggaagtggaaacccgttcaagatccctctctctgcagcagagagagcgcttctctttctttcaccgattaaacttccactctgaacctcactctttgtatgtctgagtcctagttttccgggcctgtgagacaacaaatcttgggtatttaccccagacaacaacactactccagtgggagggaacacttgaagccaggagtttgaggccggcctgggcaacttattgagacaccatttctataaaacaaacaaacaataagcaggggctaggcatggtggctcacgcctgtaatcccagcactttgggaggctgtggcgggcagatcacctgaggtcaggagttcgagatcagcctggccaatatggtgaaaccctgtctctactaaaaacacaaaaattagccaggcatggtgtcaggtgcctgtagtcccagctacttgggaggctgaggcaggagaatcacttgaacccaggaggtggaggttgcagtaaactgagatcgcaccactgcactccagcctgggtgacagggcgagactccaactcaaaaaaaaaaaaaaaaaaaaaaagctgggcacggtggctcatgtctgtaatcccagcactttgagaggctgaggtgggtggatcacctgaggtcaggagtttgagaccagcctggccaacatggtgaaactccgtttctactaaaaatacaaaaattagccgggagtggtggcacacgcctgtaatcccagctactagggagggtgagacaggagaatcacttgaaaggagaatcacttgaacctgggaggcaaaggttgcagtgagccaagattgttccactgcactccagtcagcctgggtgacagagagagactctgtctcaaaaaacaaacaaacaaaacagtcagcaggaacaggctccagggagagacgttctgctgcctgggttgggagggctatgagaagttggcagaaggaggagcctagggaggttcctagatttttctgagtgcttgaggactctctctctgatttggggaggcttagggagcactgggcagctctgagagtggcctgggagcctggctgtgccccctgcaatcctgatgctttggggtaagcaggtgtttgccccaccaggccggagggcagagcagttcctctggaacatctcccaatgcacaaaggttctggatatgggtatgactgtgaacttcccctcggcaaatacctccccgacggaaatgcacacgcagccttctctcttggaataaggcaggaaaataaaaaaataaaaataaaaaataaatgtataagaaggtgaagtcacaacgggcagtagacagttggggatattgcaccatccctgcaggaaggaagcaccttggagctgacccaggccgcctcactctgcttccttttgaaacgctcgtgacttttcaaatactgcattttgctgacagggcaaagcatgctcagctggccatgacgacaggctctctggagacttggagaatgttccaggttgactcagaggaatgcaggttggaatccctgcttcatctctggttacctctgtgagcttgggcaaggatgggctttttatttttatttttattttattttatttattattattattttttaagacagagtcttgctctgtcaccaggcaggagtgcagtggcaggatctcgggtcttcgcaccctccacctcctgagttcaagtgattctccagcctcagcctcctgggtagctgggattaaaggcacctaccactacacctggctaatttttgtatttttagtagagatggggtttcaccgtgttgatcaggctggtctcgaactcctgaccttgtgatccgcctgccgtggcctcccaaagtgtgagccactgtgcccagtcccaggctttttaataaactcttctggagtaactgggtatctgtgtggcacaaaataaaccttgatccctacctcacaccctacacacaaaaattcacctttggggaaagccctttctcactctgagtctcttctgggccatggtttccaactcatagagctgctgtggtactgggtcccagcagccctgcctgaacacttcgcaaaaagtaactatcattggaggtgtgggggttcatgcctagaattccagtgctatgggaggatgaggcaggaggatcacttgaggccaggagttctagaccagcctgggcaacatatgcagacctcatctgtcatatatatatatatatatatattttttttttttttttttttgagacagagttttgttcgttcccccaggctggagtgcagtggtgcaatctcagctcactgcaacctctgcctcccaggttcaagcaattctcctgcctcagcctcccaagtagctggtgtgtaccaccatgcttgactatttttttgtatttttggtagagacggggttttaccatgttggccaggctagtctctaactcctgacctcaagtgatccacccaccttggcctcccaaagtgctggggttacaggtgtgaaccacagcgcctggcccccacctcttcatattgtcacatgggtcttaggcttccacatatgaattccaggaggacacatacatttgggccataggagagacaacacatcagactctcaggaaggactgaaggggtgggagtgggattctgtattcgatgggactctgcaaatttgaattgttcacatagtatacagtgattcccttttatcggaggtttcactttctttctttctttctttttttttttgagatggaggcttgctctgtctcccaggctggagtgcagtgctacgatctcggctcactgcaacctccacctcccaggttcaagtgattctcctgcctcagcctctggagtagctgggattacaggcacgcaccaccacacccagctaatttttgtatttttagtacagatgcagtctcgccatactggtcaggctggtcttgaactcatgacctcaggtgatccacctgcctgggcctcccaaagtgctgggattacaggcgtgagccaccgcacccggcctgaggtttcattttctgtggtgttggctaccttccatcaacctcaatccaaacatattaagtggaaaattccagaaataattcgtaagttttcagttgcctgccgttatgagtagtgtgatgaaatcagtccccaccccgccccctcccaccctggatatgaatcatccctttgttaagggtgcccacgccatagacactaccagccggctagtcacttagtaatcttctgggtgatcagatcaaccgtgtcagtattacagtgcttatgttccagaaatccaaattttattaattttctattttattatgttattgttgttaatcttttactgtgtctcactgataaattaaactttatcataggtatgtatgtatgcataggaaaaaaacagtgcatacacgtttggtattttctgaagtttcaggaatttactggcaatcttggaacatattccccacaggcaagggggaactattgtattattttggtattcaaaataaaagaggctgggcatggtggctcatgcctgtaatcccagcacttcgggaggccaaggcaggagcaatcgatcccttgagcccaggagttcgagaccagcctgggtaacatagtgacagcccgcctttacaaaaactttgaaaagtagccgggtgtggtagctcgtgcctgtagtatcagctactctggaggctgaggtagaattgtcttgggcccaggaggctgcagtgagttatgatcacgccactgcactccagcctgggggacagcatgagagcctgtctcaaaaaattaaaacaaaatagcacacagaaaaaagtttttgaaattagcctcaataacttgacagtttcatccatgtcagggatcaagcctgaactctggatgaatcacatatctatttttttttctttttttgggggagacagagtgagactgtctcccaggctggagtgcagtggcacgatctcggcttgctgcaacttgtctcttggcttcacgcaattctcatgcctcagcctcccaagtagctgggattacaggcatgcgccaccacgcctggctaatttttgtatttttagtagaaacggggtttcaccatgtcagccaaggctggtcttgagctcctgacctcagatgatctgcctgccttagcctcccaaagtgctgggattacaggcgtgagccaccgccccggccttgaactttaatttgtctcctgttctgacctgcctcaggtggagctctgctgggtgggtggggctgatagcctttcccgtcctacatgagttgtagatatgtgtgtgtgtgtgtatatatatgtgtgtgtttatgtgagtgtgtatgtgtgtgagagagatgaattctttttttctttttacttttttctgttttttttttctaggcggagttttgctctgttgcccagtctcaagtgcaatggagcgatcttggatcattgcaacctctgcctcccggattcaagtgattctcccacctcagcctcctgagtagctgggattacaggtgcctgccaccatgcctggttaatttttgtatttttagtagagatggggtttcaccatattggccaggctggtctcgaactgctgacctcaggtgacccgccctcctcggcttcccaaagtgctgggattacaggtgtgagccactgtgcctggccaagagatgtatgttgtatttttttttaagcagaggaaagaagtataaacattaaatttaaaaacaaaacttttggccaagcatggtggctcagtcctgtaatcccagcactttgggaggctgaggcaggtgggttacctgaagtcaggagttcaagaccagcctgccaacgtggagaaaccctgtctttactaaaaatacaaaaattagctgggcatgatggcgcatgcctgtaattctaggcacatgggaagctgaggcgggagaatcacttgaacccgggaagtggaggttgcagcgagccaaggttgcgccactgcactccagcctgggtgacaaaaggagactcttgtctccaaaaaaaaaattttttttaaattgtttattttttagagacaggggtcttactatgttgtccatgctgttaaactctcgggctcaagcgatactctccccttagcctcccgagtacctgagattacggggcgtttgccaccacaccgggctaattttttatacttttaatagagacaggatttcaccatgttggccagagtggtcttgaactcctgacctcaagtgatccacctgcctcggcctcctaaagtgctggaattacaggtgtgagccaccatgcctggccgtttattattatttattattatttttttgagacgtagtttcactcttgtcacccaggctggagtgcaatggcgcgatcttggctcactacaacctttgcctcacaagttcaagcaattctccttcctcagcctcccatgtacctaggattacaggcacacgccaccacgcctggctaattttttttcacgccatgttgacggggtttcaccatgttggccaggctggtttcaaactcctgacctcgagtgatctgcctgtgttggcctcccaaagtgctgggattacaggcgtgagccacggtgcccggccgagaggtataatttctgtttattttttctctctgcttatcttgttggctgtttcttctccaatacagtcacatttcttggataagaacaaaaatataataagaccgttttgaaaatgcaggcaaagaaatgctggaaagcggtcatgaacatgccaacggagattatctctgcgagctgagcgattaagggaggggttgcagggtttttatttgttttcttttctgcttctttgtttctccatcaggaaattgaccaacatttttttaattaggggaaatgacagttaccccgtgtgcactttttggcaggacctggccttcagcgtgggtcttggggccccctggccagtctgagctcctgtggggcagtttttctggtcatctgcagaggccccgggtgcaggcaggggagccccagctcctacgcgctgcatttcctcagaggctccagcaccacgaatttttttttttttttttttttttagacaggaaatttctctgtcacccaggctggagtgcaatgacacaatcatagctcactacagcctcgactcccagggctcaagtgatcctcagctacctcagcctcctgagtagctggggccacaagcatgtaccaacacccatggctaaattttgtattttgtgtagagacaggggtctcaccatgttgcccaggctggtcttggactcctgggctcaagtgatccgcccactttggcctcccaaattgctggggttacaggtgttagccaccacacccaaccgagggcttcattctctctgacgctctgtgaatagagtttagactgtcctcccaccagcactggggtgaggtaatgcaggaaagggctggtcccactggcccagaagcagataagagcaccctccatctacagccaaaagttaaaatccaaaatccagaaccttcctgagccaccctttctgtctttggtgctggcacggcactggcatgcagtgggtgccatattattgctctccagcggcatggcaggtcttaccactgtggcatcaggaccccgggtttctctagctcgggtgatgtggatcacttgagaggccgaggatcgcttgagcccagaaggctgagcctgcagtgagccctgatggcaccattacactctagcctgggcaacaaattgagaatctgtcgcaaaataaaagaaaaaaagagagagagagagagagagtttctcttatttgcagtcttgagtaaggcgtcctgcaggaatttttgtttgtttgtttctgttttgagatggagtttcgctcttgttgcccaggctggagtgcaatggcgtgatctcggctcaccgcaacctctgcctcccaggttcaagtgattctcctgcctcagcctccctagtagctgggattacaggcatgtgctaccatgctcggctaattttgtatttttagtagagatggggtttctctgtgttggtcaggttggtctcgaactcctgacctcaggtgatccgcccgcctcagcctcccaaagtgctgggattacaggcatgagccaccacacccggccatttattttattttattttattttatttttttgagatggagtttcactcctgctgcccaggctggagtgcaatggcgtgatctcggctcactacaacctctgcctcccgggttcaagcgattctcctgcctcagcctcctcactagctgggattacaggcgcctgccaccatgccaggctaattttttttttttttttgagatggagtcttgctctgttgcccaggctgtagtgcagtggcacgatctcagctcactgcaagctccacctcccaggttcaggccattctcctgcctcagcctcccaagtagctgggactacaggcgcccaccagcgcctgtatttttagtagagacggggtttcaccgtgttagccaggattgtctcgatctcctgacctcgtgatctgcctgccttggcctcccaaagtgctgggattacaggtgtgagccaccatgtccggcctaatttttgtatttttagtagagatggggttttaccatgttggccaggctggttttgaactcctgacctcaggtgatccacttgtcttggcctcccagcctgctgggattacaggcgtgagccactgcgcccagccaatttttgtatttttagtagagatgggggtttcaccatgttggccaggttggtctcaaactcctgaccacaagtgatccgcccacttcagccttctaaagtgcttggattataggtgtgagccaccacacctgacctggagaatatatctttttcttttttttttttttttagatagagtcttgctctgtcacccaggctggagtgctatggcacaatcttggctcactgcaacctctgactccctggttcaagtgattctcctgcctcagcctcccgagtacctgggattacaggcatgtgccaccacagcacagctaatttttgtatttttagtagagacagggtttcaccatgttggccaggatggtctcgatctgctcacctcgtgatccgcccacctcggcctcccaaagtgctgggattacaggcgtgagccaccgcgcctggccgaatatttctcataccaggaaaagttggaagcagcccacagatctagcctgagaggcctggttaaattagtgtctggccgggtgtggtagctcatgcctgtaatcccagcactttgggaggccaaggtgggaggattgcttgagcctaggagtttgagaccagcctgggtgacatagggagcccccatctctacaaagaataaaaattcaaaaattagccaggcatgtggcatgaacccatgttcatgcctatggtcacagctacttggaaagctgaggtaggaggattggttgggcccaggaggttgaggttgcaatgagccatgattgcaccactgcactccagcctgggtgacagagcaaagccttgtctgaaaaaaaaaaaaaaaaaaaaaaaaagatttgtgtctgcatgacacaccatgatgtggacagggaagggatggaaaggacaccatgcatgcagataggagaccacatacactgcagcaactccacttctgtgaatgtatccgacagaaatgggaccttcattccgctgggtgcggtggctcacacctgtaatcccagcattttgggaggccgaggcgggcagatcacttgaggtcaggagtttgagaatagcctggccaacatggcgaaaccccatctctactaaaaatacaaaaaattatccgggcgtggtggcacatgcctgtaatcccagatactcgggaggctgaggcaggagaactgcttgaacttcggaggtggaggttgcaatgagccaagattgcgccactgcactccagcctgggcaacagaggaagactccgtcaaaaaaaaaaaatgccctgttgcagtggctcacacttgtaattccagcactttgggaggtcaaggcaggcagatcacctgaggtcgggagttcgagaccagcctgaccaatgtgaagaaaccccatctctactaaaaatacaaaaattagccaggcgtggtggtgcatgcctgtagtccgagctacttgggaggctgaggcaggagaatcgcttgaacccgggaggtggaggttgtggtgagccgagatcgtgccactgcactccagcctggtgacacagcaagactccatctcaagaaaaaaaaaaaaaaaaaaaaaagaacattctcaagaggaaataaattatccgtgacagggctcaatggttctccttcattcatgtgaggtttttaatgctttttcatatgccttgggggagagttgtcaaatcttaacaaatcagagaagaattataactcgtagaagaatgtcaaaggcatttggagggtggaagctgcagaaattgagccccatctgcaaatgggatggacagatgaaagatgtacattctcaagtctgcgtaggaacgtatattaagccgagcatggtggctcacgcatgtaatcccagcactttgggaggccaaggcgggtggatcacctgaggtcagaagtttgagaccagcctggccaaaatggcgaaacccgtctctactaaatacacaaaaatcagccgggcatggtggcacgtgcctgtggtcccagctactcagaacgttgaggcaggagaatcgcttgaacctgggaggcagtggttgcagtgagccgagatcgcgcccttgcactccagtctgggtgacagagtgagactccgtctaaaaaaaaaaaaaaaaaattgatccattccatcttgcatttttttaataaagtttttttttaattaaaaaacattttttttttggtggagattggtgtcttactatgttgcccaggctgatcttgaactcctggactcaagtaatcctcccacctcagcctcccaaagtgctgggattacaggctgagccactgcacccggccttgcagatgtggttaacacctccaatcaactgacctgaagtaaaggaatttatcctccatgaccttgatgtttcttttttttttttttgaaaccaagtttcgctctttttgcccaggctggagtgcaatggcgtgatctcggctaactgcaacctccacctcccgggttcaagacattctcctgcctcagcctcctgagtagctgggattacaggcatgcaccaccatgcctggataatttttgcatttttagtagagacggggtttctccacgttggtcaggctggtctgaaactcctgacctcaggtgatcctcctgcctcggcctcccaaagtgttggggttacaggcgtgagccactgcacccagccgatgcttcttatctaatcagttgaagtccttcagagagcaaaaacagcttctagagggaaaaaggaattcgtaagcttgcaacaaataaagcctccctgtttccaacctgctagagtgccctatgaattttgggtttatcagcccccacgattgcatgacccaattccttaaaatacatcttttttttttttgagagagataggatctctgccacccaggctgaagtgcggtggtgggatcatggctcactgcagcctcgacctcctgggctcaaacgatccacccacctcagcctctggagtggctgggatcacaggcacacaccaccatgcccaaactttttaaaaacttttttgtaaacatgggatcttaaactcctgggctcaagcaatctttccatgtcagcctcccaaagtgctaggattccaggcgtaaaccaccacgcccagacaaaataaatcttaaaaaattttttttttttttagagaaaatctctttctatatatgtaatatgtatatttcctgttggttctgtttctcttgtgagccattactgatacaggcacccagaggcccggtgatgggaaggaggcggggttactttccaatacatactcagggaatttcttttttttctttttttgagatggagtttcgctctgtcgcccaagctggagtgcagtgtatggtcttggctcactgcaagctctgtctcctgggctcaagcgattctcctgcctcagcctctggagtagctgggattacaggtgcccgccaccatgcctggctaattttcgtatttttagtggagacagggttttaccatattggcgaagctggtcttgaactcctggtctcaagtgatctgcctgcctcagcctcccaaagtgctgggattacaggcgtgagttaccgcgcccggccactcagggaatttctgagatagtgacagcttccggtggcaggacctcagctgattgccttggcctttgtccgctgaacccaggccagcttcctagcctcgggcgccacccaagacacctgcagaccaaggacacacattagaggccttgggtttcacggtcctgggcagggccaggcctgaggtgctgaccaagcctgctaccctcaaccaaaataaacctagggcaggatgctgcttgatcagccatccatagaacaccacagcccgagccgggtcacagatctgctttggctggcctgcggacagggaggtcctcagccgcaaaaggcctgagaggtggacacattggatttgaagaccaaaaatggcccccttctggttgggtgcagtggctcacacctgtaatcccagcactttgggaggctgaagtgggcggatcacttgaggttgggaatttgagaccagcctggccaacatggtgaaacctcgttctctactaaaaatacaaaaattagccgggcttggtggcatgtgccttgtagtcccagttactcggaaggctgaggcagaagagtcacttgaggctgcagttgcagtgagccgagatcgcaccactgcacttcagtctgggtgacagagcaagactttgtctcaaaaaaaaaaaaaaaaaaggcccccttcggagatgtgggagttgggggtgggggcagatttcaaagcctgggggattcgatctgtcatctgtgcaacccagctgactatgtggctaaagtttaacaagtttcacaataaccattagacattgactgacactgccagggaagtgctccagagatggggaaacccacgtccacacaaacacctgtccacgcgtgtccacagcagctctagtcatggttggcagaaagtggaaacctccccatgcccatcagctggtgcatggataacagagtgtgttccatccacacagggggatatgatacagccatggaaaagaaggaagcactgatccatgctacagcgtgaatgaacccccaaaacacgatgctgagtgagagaagccagacacaaaaggccacacagtgtgagattccattgatctgaaatgcccagaacaggcaaatccatagacaggaagcagattggtggttgccagggactggtggaggggaatggggagtgactgctgatggagacaggtttctttttgaggtgataacaatgagcctgggtggctgggagtggtggctcacgcctgtaatccctgcactttgggaggctgaaggggacagatcacttgaagtcaggagttcaagaccagcctaggcaacatggcgaaaccccatctctgctaaaaatgcaaaaattatctgggcttggtggcatgcgcgcatagtcccagctactcgggaggctgaggcaggaggatcacttgaacccgggaggtggaggttgcagtgagccgagatggcaccactgcactccagcctgggcaaaagagtaagaccctgtctcaaaaacaaacaaacaaacaatttattatcattattataatttaagatggcatctcaagcgacagaatgggccttcgtctcaaaaaaaaaagagcctgagcaacataacaagaccccgtctctgcaaaaatataaataaaattagccaggcgtgctggatacacctgcggtcctagctattcaggaggctgaggtgggatcgtttgagcccaggaggtcgaggctgcaatgaactatcattgcaccaatgcattccagcctgagcgatagagtgagatcccacctaaaccgcatttattgagtatccactgtgtgccaggcactgagctgggtgctagaacagagcccagagtgggagaaacagctataaacagacgatcatagtgccaggggaatgcttcttttttttctttttctttttttttttttctgttttttttgagatggagtcttgctctgtcacccaggctggagtgcagtggcatgacctcggctccccgcaacctccacctctcaagttcaagtgattctcctgcctcagcatcctgagtagctgggatgacaggcgcgcgccaccacgcctggcaaatttttttttttttttttttttgagacggagtctcactgtatcgcccaggccggagtgcagtggtgtgatcttggctcactgcaagctctgcctcccaggttcatgccattctcctgcctcaacctcctgcgtagctgggactacaggcacctgccaccatgcccggctaattttttgtatttttagtagagatggggtttcaccatgttagccaggatggtcttgatctcctgacctcgtgatctgcccacctcggcctcccaaagtgctgggattacagaagtgagacaccgcgcctggccatttctgtatttttagtagagacagggtttcaccatgttggtcaggctggtctcaaactcctgacctcgtgatccgcccaccttggcctcccaaagtgctggtattacaggcgtgagccaccgtgcccagcctggatgtttctcttatagcacagagaggggagagatgtagcattttatgaacctttgaagaatggaggagggggtgtgggtgttgggttttgggggatgaatatgagtttgccaagttgaaggtgggggctgaccatgaactgaactttatggaatctaaccaacacaacaaaataaatctaattttcaaaatgaaaatgaaaatgagcatattctcctttgttggcgtgaactgcaggaatgtttatatgtggacacttcacaggccagcctgcaccaggcctggctcatgccggccagttccttcctgaagctattcatgtctgctgcaaagatgggattaaaaacagcatgttggcctcttcattcattaggagagtggagaaatgggaaaatttgggctgcccaaactcctcatgatctatgaggataaacagaaagttcaacgccagccctgactgaggaccccccacaaggacttatcttctatgtttttcttttctttttttgagatggagtctaggtctgttgctcagactggagtgcagtggcatgatctcagctcactgcaacctccacctcctgggttcaagtgattctcctgcctcagcctcctgagtagctgggattacaggcttgtgccaccactcctggataatttttgtattttagagatagggtttcgccacgttggccaggctggtctcgaactcctgacctcaagcaatccgcccgcctcggcctctcaaagtgctaggattacgggcgtgacccaccacgcccagcctccttgctctctgaatctggatctcactttctgtaaatccaatgtgacctttggctgtttactgagtacaagacgctcctgatgacccattttacagatgaggaaattggggctcagagaaggcgagagagcagagactgggattcagtgaggagggtcccagggggcctgatgatgatgatgattattattattatggagacttgctctttttgcccaggctagagcgcaggggcgtgatgtcggctcactgcaacctctgcctccagggttcaagtgattctcctgcttcagcctcctgagtagctgggattacaggtgtgtgccagcatgcccagttaatttttgggtaaagacagtgtttcaccatgttggccaggctggtcttaaactcctgacctcaaatgatccacctgcctcggcctcccaaagtgctgggattacaggcatgagccacccgcacccagccaggcctgaatttttttaaagacagggtcttcctatgttgtccaggctgaagtgcagtggcacaatcatggctcgctgcagctttgagctcctgggctttagtgatcctctcacctcagcttctcaagtagctggaactacaaggaatgggctaccacacctggctagatttttaaattttttatagagactgggtctccctatgttgcccaggctgttctccaactcctgggctgaagtgatcctcccactttggcctcccaaaatgctgggattacaggtgtgagccactgcacctgattgatggtgagtttgaagtggaaggtgtttgaaggggtgaaagtgtccatcagaaagcagctggccaggcgtggtggctcatgcctgtaatctcaatcccagcactttgagaggctgaggtgggcggatcacctgaggtcgggagttcaagaccagactgatcaacatggagaaaccccatctctactaaaaacacaaaattagctgggcatggtggcgcatgtctgtaatcccagctactcaggaggctgaggcaggagaatcgcttgaacccgggatgcggaggttgtggtgagccgagatcacgccatggcactccagcctgggcaacaagagcaaaactctgtctcaaaagaaaagaaagcagctgagaccaatatagctaaggagtgaagagctgggttccgattctgattctgcccacttgcaggggctcttcctagtccttctgtgaacagcatcttgttgtgcttggggtctttcccccttcttagccaatgaagccctagctatcagtgtattgtagccctctggccactgtgattggttcagagacaggcatatgccccgggctggggcaataatagacaatcttggtgtctgtgccacccctatcagacaacagagctcttgtgatgttgcttaaatgggtaaggctaggctccgagttgctggccaccatcttgcctgcctgtaaacaaaggacagcaaagccaagaaatagagagagaggctggtggttttggttgagtgccttgatccagctgatcctgaaggtgtcctttccaattccatccaccaattaattccctttttggctttatgcagcccaaagagttcccatgtattcagcccttagtgctgcagagacagcactataaacatgtcagttacttcattcattaggagagcagagaaattggaaaattgaggctgccctcattgctgtctatgaggataaacagaaagtcaaagaccaggcaggctgtagtggctcctgcctgtaatcttagcactttaggaggctgaaataagcggatcactcaagcccaacagtttgtgaccagcctgggcaacatagtggaccctgtctctacaaaaagaaaaaaaaaaaaaaaattagccaggcatggtggtgcatgcctgtagtcccagctacttgggaggctgaaatgggaggatcacctgagctcagggaggttgaggctgcagtgccaccgcactccagcctgggtgacagaatgagactctgtctcaaaaaaaaaaaaacaaaaaaaaaaaacagctaaagaccagccctaagaactgaactttctggaaatggcttggacgtcccacctgcctgccccagagagttgttaaccaacgtctctgggcctcagtttcctcgtctgtaaagggagctgtggttgcctaaggtgaaaggagcacaggtgccaagcgttctttgccatgcctggcgctataagatatccagtgctatctagggatgccccccgggtgcccaccctggactcctgcttacttggacttggataaaagaaggttttctggccaggtgcagtggttcatgcctgtaatcccaacactttgggaggcagaggcggatggatcatctgaggtcaggagttcaagaccagcctgagcaacatggtgaaaccccatctctactaaaaatacaaaaattagccaggtatggtggtgcctgcctgtagtcctagctacttgggaggctgaggcaaaataattgcttgaaactgggaggtgggggttacagggggttgcagtgagcccagattgagctgctgtactccaccagcctgggcaacagagtgagactctgtctcaaaaaaaaaaaaaaaaaaaaaaaaaaaaaaaaaagaagaagaagaagaagaaggttttctgcgttctgagggacttagttgctcccagacatctctgcctcttgcaacaacctgccaagaacgtggagagccagaaaggagagggtgaacatctctggactgaaacagggaaactgtcaaaggctctagagtaggcaggtgggacgtccaagccagaaaggacaggtttgctctgggttccttgcaagtgacctccatggggttcggggctgagacggagcctacaacgttgtctaaggccacatttcagacaactgccagagaatggttgttttaccaaatagctggccagcacacggggtctatgtctctgtgtcttttggctaggttattcacaccccaccctcgtcagctgtcagggttaccctggggaatgtcaattccaggcacttctggttccagtgggcattcaggcaaagggtgctccagcagcccagggtagccctgataccctgcacaggtgcctgccattaaatggggctggaaccgaggggtatagatggaacagttcagaattgctttcattcctgccctgcccttccagactgctcttttaaaaggtgtaaatcaggccaggcatggtgatacatgcctgtagtcccagctactcaggaggctaaggctggaggatcatttcagcccaggaggtcaaggctgcagagagctatgatcatgccactgtactccagcctgggctacagagtgagatgccgtcttaaaaataataatgataatgatgataaattttttgtttgtttttgagacagagtcttactctgtcactcaggctggagtgcagtgacgccatcccggctcgctgcaacctccactttccgggttcaagtgatcttctcgcctcagcctcccgagtagctggaactatgtgtgtgtaccaccatgcctggctaatttttgtatttttagtacaaacggaattttgccgtcttgcccaggctggtctcaaactcctgacctcaagcgatccgtctgccttggcctcccaaagtgctgggattacaagcatgagccaccgcaccatgacaaaagcccctctctactaaaaaatacaaaaattagctgggcatggtggcgcgtgcccatagtcccggctactcaggaggctgaggtgggaggattgcgtgaatcttggaggtggaggttgcagtaagccgagatggcaccactacactccagcctgggcgacagagtaagaccctgtctcaaaacgaaaaccaacaaataaaaatgtgtggtgaatgaatgaatgaatgaatgagtgaacagacaagatgtaaaaagccgatcagagcctctgccaaggagatgtcagagggtttttcacagcagcctttgaacaatggccctgggaggaagccaggcttatttccccatttgacacaggaagaaactgtcttggttcaaatctgatccttttttctcctaagaccacagctgcctccgaaacaaaggccgacaattgctgccagcaagtgctttgctgtttttacttcctctaaacattcttcagtggattttcctttcaaactggttgtaaggaggcacatggctgggtgttggtggggggtggcacccctgcccggaccccacacgcttccctaccacgtggccggtttggagtagacccatctttgtgctgaaacacagcccaacattgccatatacggggggcttgtctacattttacaagatttttacaaaaatgatgctacactttgcaaatggatttattttttttgagacaaggtcatactctgtcacccaggctggagtgcagtggtacaatcacagctcactgcagccttgacctcccgggctcaagtgatccttcctcctcagcctcccaagtaggtgggactacaggcatgtgccaccatgcccggctagggtttcttttttttttaatagagatggggtcttgttacgttgcccaggctggccttgaattcctggcctcaagcagtgctctttcctctccctcctaaagtgctgggattgcaggtgtgagccaccacgcccagcttggaacatctttattttaagatgagcatgctggggcctcagggagtgaagtgaattttccaaagtcactcgttgtgaccaggacactggagtcaaggccctttcatcatgtcatggggtctaggtaaggactcaggaaacttcatttatttatttatagatagagttttgcttttgtagcccaggctggagtacagtggtgcgatctcggctcactgcaacccccgcctcctggattcacgcgattctcctgcttcggcctccggaatagctgggattacaggcatgcaccaccacacccagctaatttttgcatttttagtagagacgaggtttcaccatgttggccaggctggtctcgaactcctgacctcaggtgatctgcctgcctcggcctcccaaagtgctgggattacaggcgtgagccaccacgcctggcctttgttttaaggaggaggagtcagccaatgggatgcctcaaggactgggtccactgacacagaacaatggaaacagatcagcgatgtctgagttcacagcatgcgggtgctgctcctaagaacccttctgtagatgctactgttctccccatttgcaaatgaggaagctgacactcagagatgtggatcacccgccccaggttacacagcacagagaggacatgttaggactgaggattcaaattcttaaggtttgctttcctcctggcaaaagcaagtcatgaaggcgtggaagctgaaatctcgaggctaacgctccccttttcacacctggccacaagctgcaagaactgggagttggtgctcccatgagtccaacctgaggattcgctggagaaaaattcagccaagaaaagctcagctcgtgaggtccccctcctgggctgtgaaggaagcggatagtgccagtcattacagagccgcaattcctgagtgttaaagttctcagggccatgagtatggacttcgtgggaaatagaagcaccgtgtagacctatgcatgtgtgtatgtctgtgtgcatacgtgtgcatgtctctgtgtatgtatgtgcatgtgtgcacgcattcgcacatggcgttgcacagggtgtgtccatgtgtacgcaagtgtgtgtatatagggagcttctaaatcagatgaaaccaactggaaatccggatactgatgtttagaattcaagctctggagtcagactgccccaggcctcagtttttccattgggaaatgggctgatcctccccggatgagagcactggagtccagagaggccaatgacgatcagatttatctcagtatatggtctgtgctgtgggccttgaggctgaaattttgtgagctcctttaattctcttttttgtgtgtgttgggggttggcggcagggtcttgctctgtcgtccaggctgggctgcagtggtgcattcatagctcactgcagcctccagctccctggctcaagcaatccttcaacctcagcctcccgaggagctgggactacaggtgggactatcatgccctgctaacaaaaacgtttctttttgtagaggtggagcctccctatgttgcctaggctgcagccccagcattcattaatcatccccggctcctacctctgcccagcccttaatcccccgaacatatgatggggattaatcccccaaacccttgggggggattaatcccccaaacatatggggatggggggacttgtgacaacttaccactctttccctggatagctcctctatggaatgtggtagagtttgggggccacccaaccctcaggctggccagggaggggtgggcaaggggagctgagaagggcttggggatcctcacgagggaaaactgaggcccaagcgggtgggatgtgaaaggatcagtcggtaacaagaccagtccctctgaaccctctaagagaggtcctgggtaaccgtatgtatttaaccctgcaagctgttggctacatttcactggagaaaatgcaggcgtggagggtcccaccgcttgaccacctcggggaggactgactgtgagcagagggtcagtaatagcgtccctgttgctggcacatctctggccctcaaaacaccaccctccaccatgggtgggcattggggtagtatgtggacacaggggagatagaggcctggctgggcccctcagggaacacggtgaccccaaaccaccacaggctcctgcactgttgaggtggggctggtgacagggtgggggtgacagggacagagttgagggacctggaggaggtagagagagtcagcagtcaggtccatatcccaagaggtcagggtttggggggtgaagctggcattggagcccagcctaagggccagtgcctgccagagacacctgcaggaaccacagcccccactgtcccggagaggcagggaaactagggaattgggacatcagcagggtcaccccaaagttagatggcacatgaactgtgtggagggaggcagcaaggtgaggagaccctcaggaggaccctttgttctcatatgctatttcctggactttgtccacaaagaagcccattctaggatgtagggcccaaacccaaatggctaggcgtggagaacctgttagctaaatgacaagccatcatacatacatgtgtatatgtaagtttatttcaggtttgtatttttagatatagggttgcccaggctggagtactgtgatgcaatctcaattcaccacagcctccaatcctgggctcaagtgatcctcccacctcagcctctccagtagctgggattacaagcacaggctgccacacatggcttcagaattttttttttttttttttgagaccaagggtcgctcttgttgcccaggctggagtgcagtggcgcgatctcggctaaacgcaacctctgcctccagggttcaagcgattctcctgcctcagcctcccgagtagctgggatgacaggcatgcgccaccatgcctggctaacttttgtatttttagtatagatgaggtttctccatgttggtcaggctggtcttgaactcccaacctcaggtgatctgcccacctccacctcccaaagtgctgggattacaggcgtgagccaccgcgcccagcctcagaaattttttaagtgaaaaaaagcagggagcagaatagaacttgaagtataatttgcattttaaaggttccatctaaaacacgattgtgcctacgattgtttacatgtggaatatcctctgaagccaacccaatacctgctcttttcccacgggccatggagactgctgagacagcctgtggggagaggaaggcagtctccgagtggcacccttggagtgtcctgtcatttgttttgacttatgggaggagaaagcctctgtgctccattccgcatacatctgggtttggtttttcatcttttacaaggaaaacgtcctcgcgtgctgcttgaacatgcatgcgcgcacatctgtacgtgggcatgcatgcacagcaaaggcctggactgaagccacaccttgcttttgctactggggcttcttggcagcgccttctgcctgtcttgccccaaggaagctccagggaggagaaaggccatgacagggatcttgtggttccacttagtcctaaattattaggttggtggaaaagtaattgaaggttttgccattacttttgcaccaacctagtacaaggcagcaggggagattttaccttccaaatgagatccttcccagtctgtagaggggaaactgaggcctgagatcaagtgacctgcctgggtcaacgccaggacaggcatcctgggctggacaccactcctcctgtcctcctaagacaccctgaccggccttagggtgatattaagaggaactaggggaagaagggttccactactgaagagaaattcctggtggttcctcaccccctgcaggtgagccccacattttccctgcaggctccggcctttctcagggagtgccactgaagctagcggttagacatcgctaagatgaaggcagggtgagggtcttggctggcaatagcttcccccgggacacggtagaagtgaggctgggggtcctgcctcagcttcctaagggctctgtctcaaggctcccgctaagctgcccacagggacctttctacatgagcatcacctgccctgggcacagtgccttccccctccctgcagtctggctcctcccctcctcaccctggtcaggcagaggcccctgcaggccccctgggtgctgccttggtctctgctgtgccctctgcacgcccctcctcacctggagggccaaggggctgttgacagaggaaccatgggcaggctggcagcacccagggacagcagggagtgtgaagatgacagagaggcagctctgcagtcagagggtggcccaggcaggctctggttttactctggcagctggaaccccagccctgggatgatggggcaaagccctgtggggacaggtgagtcgtaggcagcaggggcacagctcccactgccctgacacccctcaaaggcagcttctgtacttggcggtaccgattaccctccccagcctccccagaagggaattgccctccctctggtgggtgcttggtcccttcctgctctctggcatcttccaagctttcctggtgacagtgacacaaggtccctcaggtggggcaagccagtgaggaggggcccgagggaggagcaccacgccggcggagggcacgtcctgggaggcagccatcatctggttctacactgcactcccatctgcgtgcgctggtgtctgatctgattttaaaaacacagccatggagaccccagcacactgcatttcctctacatttattgcaacggctaaatgattaacaacattcacaacttcttagatcttaaaaaacagaaacaaaagaaaacttccattttgtaacatcacaaatgtcttctaggctttatcaaggaccaaaaacactacaattctctaagtgatttccagtgatggaaacaagccagagacagtaaagcacccagagtggcgagagagcacttccagatgcctgttgtcctctcgggggtgaccctggaactagaacgacagaaaagacactgtgactttgacacggctgtgccaccacacatcacgcgcgacacgaggatcctgcagagcggcctctgcagagagcaaggacagcctcggttaagagggaggggctgggggcacggagggccagtggcatctcctctatcccggctggccggcagctggcagcacgcaccatgctctgctggctcccgacaccttcactgccccagcgctgaatccacaggagaggtgtcctctgagagtgtagggggctttctaggttcaaggagatgtgccctttgacccctgccaaggactcacagaaccatctcagctcaaacttggaggagcggcaggaggtggggggcggtcagtggccacacgccacagattcctaaagcatttaactttttaataaaatgaagtggagaaagtcaagaatgaacatgctaggacaaagcacatggaatggtcagggcgatgctggagagagtgcgcttgatccacgctgcaggtgtgtgcgcctcgctcgggtcaatgggctgagccccgcttggagctccatccattcacctgacccatggccaacatggaagctgtcggaggggtcaggaaaggagaaggagaaaggagaagatgaaccccccgcacctgtgactccccaaaaccagctccactccaggcccccacaggctggttcgttcgagggttgggttataaacccaaactccatcctccatgctggcacctctactgccataaagatctgccagttgccaaagctacagaagccactggaagcaagcagagcccctgggggtggtggcactgcaaggtgacagggaccaggcagacaaggagctgggaccacagcctaggaagtctgtggcttaaagaaagccaggatttccttttttttttttgagacagagtctcgctctgttgccaggctggagtgcggtggcacaatctcggctcactgcaacctccgcctcccgggttcaagtgattctcctgcctcagcctcctgagtagctgggactacaagcgcccgccaccacgcccagctaattttttgcatttttagtagagacagggtttcaccatgttggccaggatggtctcgatctcttgacctcgtgatccacctgcctcggcctcccaaagtgctggaattataggcgtgagtcaccgtgccggccttttttttttttttttttggagatggagtcttgctctgtcgcccaggctggagtggagtggcatgatctcagctcactgcaacctctgcctccccggttcaagtgattctcctgcctcagcctcctgagtagctgggattacaggtgcccgctaccacgcctggctaatttttttgtatttttagtagagacggggttacaccatgttggccaggctggtctcaaactcctgacctcaggtgatccatccgcctcaacctcctaaagtgctgggattacaggcttgagccactgtgcctggcccaaagccaggatttctttacagccaatacaagtggcatttcccgctcagttctgtggctgatgccctagccactgctgtgtcccctaatcctggggtgtcagagggatcctaagttttccagatttttgcccatacttaaaacttcaacgatcctgcttcacaaggaaggatgagtggagaattgagtggagttacacgcagcagagtgctggggaatctggagagcgggggcgatcacatgcctggaaatagagcagctgcagagcccaccccaggaggagcctgcctctccttacaaaggctgtaataagacagcacttgacgatgccatacgtgcgaaaagtgcagagtctcagagggtttacaacccccatccctttgtaactgtagtttgcttacactgtggattctaaagagacatgtaaatctggggccgatttcatctgtttaatgattactccccacccgatagagctattctatactgttgctaaaatttcattaagtctctcaagatgcattgatgagatgagacaccatgaataacacattcatcaactcaagtatggcaactgttcagagagcttcagagctttggtacccgagtgcagacttggtaattaccgggaatttgtctcccccgtataaattctggcgaacaacgagaaaacaccatctgtgatcgtttccacatcacgtttgctaacagagcacttctggagagcaatggccagtccaactggaaaatcagccagaggagctggttcctcagcactcacaggctgaggtgcctttcgggggcagcgccaccttctgaaggggaaccaagacagatttggaggggacttgctgctaaaagcatgtgaacagagaggagaggcaaaagcacattgaaaatggtgcatgtttttttctttgagagaaagaaaagccagcgaaacctccgccccagagactgcagagacgtttgttttcatgtacacaccaaaccgtacttgggcactggctccaggccgatccagggcagggatgatgttttaagggcaattgctgcttcaaggcttatctttcacatcagtggttttgatctattcaggaagagaacgattttgttcaaaactgaggtggaaattaggtgagggggcaactaaaaaaaaaaaagaatagaaagatgaggatatttacaggcccaaggccctgcagaaggaaaaggatttgaagaccctcacaaagggacacagccaactgccatcctctgtggcagtggctgtcacagtcgcccttccacttgcatgatggcaaggccctctggactaggaacagtccgtttgctggtcatgttatgtggtaggtggctgtcatctgtgagagaaaacttgagcaagagaagagacaggcgtggcctatttccacacgcacatccacggaggctggcctggaggccttgaggggctcacagccggggcaccaggcaggccatgcgcatctgcccttggccagtgtgaggtttgctccttcagcaaacctggaaggtaagaatggggcatatccacatccatagacccttttgtttccctcacagaattttgtgattttttttgtgtgtggcatttttgggggagcagggaacatcaactttgttgggggaaatttctctgcataccagcacgccagcgagggcagacggccttacacactggcctgtgaacatacctatttgttggcccgcttgtgtctgtacatctgcatcatcctctgtcggaacacatcgaatgtgtcttctttgtgctcctgcccgtcagcacccaacccttccccttccgagggggttcccctagggagtgaaaaagagagtcagttgtgcacctgagcccagggcctggcatgccaggaactgggcatgggcacaaacagtccatgagatgcaggtgtttgggacacacactgagacatcaaagaaagggaaaatcaagacgcgactcacagtagaaacaaggagtactcaccctcgaagagctggcttttgagggggtgcccagagggccctggttacctcggaatgccttacccagcaggaactaagctcagtattaaatgaaatgcctgctggaggttatgatcggggtttaataaactttgggcctgtgttcgggaccctggctggcccggctatgggttcccgggaatgggaaagcagttccagacggaaactacacagaaataccacttagcttttatgatggtcacaaatgtggccaaaatgaccagggccaacaagctggttaaaaaatctacaccaggacagaaaggagccctgtaaacacctgcacatgtaaatgatcagcttctcatctgaagatgccttctgtttaaaaaacaaaaatcaactgccagctgtaagccatcttggctgtgaaggagccaagcggcaggctgcaggtggaaggactgaggccccacccactcccaccccaggctgcctgctgcgtacacgctgaccggctccctgatgccctttccgagggagcccaggccatggccctccttccagcccatcttctgcagcatctggaagcccaggttcttatcggtcagcttctgctgggcgaagtccaagtccttgggtttctgaggagagaggagagtccaggcatgtgggccacagggagatgcctggatcaagggtctgtcctaggctatgcctggagcccctcacccccaaatgccctcctgactccccagatgctcaggctcaagctccagtcacttccccagttctctgcaacatccctgggtgggatggaacttctaagtcagaggtcactggcctgaggtcagtcgtgcctctcagctaccactataaccctggtgccaagactgtgaggaaaactgggtaagggaatggccagtcccggggtcaaggagtcagtaggaaggccctcagcggaaccctggataaagaagggtggccctgtgatgaccacagggcgcagcccagggaagagtggggggcaccagggcacaggcctgcaggcaggatgggggccagacagtgggtgagaactggctggcagcaccctccctgaaccaccccaacatacccctccccgagtgcttcattcactccctggctgcattgtctgtctgtcctcaggactgagttctacttggacattggggtctgtgtctagcacagagcagacctcactgagagctagtacagctgttgattgctcctgtgggtggtggggaagtgcagcaatctctgggccactagatggagatctggagacagacagggccctggggcctctggaggaggagcctgcagggctgtagcagaaggaatttctattcactcatgaatattcatgacacactgctgtgtgacagagcccagctgggcagtccaagaccttgccatgtattccttggctcttcacgagtcaacttgtgtgggtgggctgggcgtggtggctcatgcctgtaatctcagcagtttgggaggccgaggtgggtggatcactggaggtcaggagttccagaccagcctggccaacgtggcaaaaccccgtctctactaaaatacaaaaattagccaggcatggtggcaggcacctgtaatcccagctacttgtgaggcggaggcatgagaatcgcctgaacctgggaggcagaggttgcagtgagcggagaccgtgccactgcattccagcctgggcaacacaatgagactgtctaaaaaaagaaacaaaatacaaaacttgtgtgtgttttttttaaatatagagtcttgctatgttgcccaggctggtctcggattcccggctttaagtgatcctcccacctcagtctccccattaactggaactataggtatgtgccactgcacccagcttttgatgtttttttttttttaagacggagtcttgctctgttgcccaggctggagtgcagtgatgcaatctcaactcattgtaacctccgcctcctgggttcaagcgattctcctgcttcagcctcccgagtagctgagattacaggcgtgtgccaccacgcccacctatttttgtatttttagtagagacggggtttcgccatgttaaccatgctggtcttgatcaaactcctgacctcagctgatctgcccgcctcagcctcacaaagtgctgggattacaggcatgagccactgcgcctggctgatgtatttatttaaggcatttactgaacgacctggggaggctgtgagggttcatgtgctcttgagagggagggaggaaggtgctgaggaggatcacgggggctggtgctgggggtctgagcaggggacaggtgggagtggctgggagagggttagatgaccctgggcatgggaagcagggtgagaagggcatgctgagtgctgtgagctcaggtctttgggcagtcagccctcatcagcttagcaacctgccccatgatgtcatgcaggcctcacgaggtataattcaaccaaaagacaaatcccccccttgccatctgcattgaggtgcccaggaatcagcttccctaacgttaggggtgcatgtgggaggcactccagagacaaaggagcttggagacaaggcacaaaaggctgagcctgggggagccaggggctgggagaggaaagggagaagggagagagcagggcctcaggtcaggagggagggagggaggagagagcaagtgctcccataaggaaggcctgggcctctggagctcctggggcctcagtgttctcaccctagaaagggacaaaacaacctggagaggtgctgagaactcaacatgcagcaagatgtagggggtcagaaacggataccctaaggctgggcgcggtggctcacgcctgtagtcccagcactttgggaggccaaggtgcgtggatcacgatgtcaggagtttgagaccagcctgaccaacatggtgaatccccatctctactaaaaatacaaaaattagccaggtgtggtggcacgcccctgtaatcccagctactctggaggctgaggcaggagaatcccttgaacctgggaggcagaggttgcagtgagttgagatcatgccattgcactccagccttggcgacaaagggagactccgtctcaaaaaaaaaaaaaaaaaaaaagaaagaaagaaagaaagcgataccccgaattatagcactttgacaggtgggactaaagtagcagcctcaaggtccctcccaaagcacaggaggaagctgttttcttcaagttccctatctacctagaaactggacttgccaaagaagaacacaagggccttggatcccttccctgaaatgtcattaaccagagttgaaaactcctatcacacaagaagagatggaacattaaacaccacacctagagcccagaccactggctgttctctagtcccattcaattctcaatgaggatcattcacaagatgatgcctgcctccattcatctctcctaaaatcatctgcttcccctctaaagttacctacagcctcccatctgccctctcccctacaaagaggtatttcagcttcaaccacctggcccttctttgagttttcataatgttttatatggctcctgtgcttatgcacgtgaataaatatgtataacttttttgtttcaagacaggatcttgctctgtcacccaggctggagtgcagtggctccatcatggctcactgcagtcttgaactcccgggctcaagtgatccccctgccttggccttccaaagtcccgggattacaggtgtaagccaccgcacacctttttttatcctgttaatcttcttattgtcagttcatttcaacaggcttagacttggaccttcaaaggcggagggaaattccctttgttctcttcagaggcatctccgagggtattatataaagtagctgtgtgtgtgtatgcatgtgtgtgtgcgtgtgtgtatgcatgtgtgtgtgcatatgcgtgcacatgtgtgtatcttgtgtgtgtgcgtgagttactggatgcaggcggcccctccataatggcatgaggtggtcttggtgaggcggtgtgggcagaagtgtctctgcagggcagttaaggaggggaggtatgaagggaggagctatgctatgggctgggacaggaagaggggcacaaacagtgaagagacacccctgcaaaccaggggacaccagacaggacctgctacactggggggccccttgccatgagaaagtggcctggagaaaagaggtgacagaacccaccggctgagatgagaaacggggcatccgtcaggcccttctgggagctgtgcacgacctgggccctgggatgacgggtagggaaggaaggggaaaggctggtcatggcagggcacaggggtccccagagggcaggtctgtactcttttccctttcaggaaggctgcttggaggtgcagtgggaggaagagggtttggctcagcctggaagtttcttcgtgaatgttcaaatctgtgtttaacaatcatgatggtggtttcctggacagctggaggaaagccaagccctgtgggcgaggtggaggtttgcagaggaaagctgcagccaccacggcctcccttccacccacagtcactggcagacaggaggacaggtgcagagccccaaggagacagcagcatgtgcaggacacccaccaggaaccgcgttcagtttaatcctcactgtacctcctacctgctgggtaagtgtggccatcccattttacagacaaatccgtggctcaggggttacacgccaaggttacaaaactactcggtggcagggctgagctagagtacagctgtgcctgacaccaaggtcctgctgtgccctcatctggccgtgcccttatccaggccacaccaaggggcaccagatgccagctcagcctaaaacctggcacatcagtaaggactatgagctctggactcgggaaggtccctccttcctgccataattggggtcagactgacctaggtcactcggaaggggttggaagcaacatggcactgcctgacaccagcagagcgatctcgcctggctccccgccctcctccctgaccatgaaggactggtgaagtctctccacatgtgtcccaggtgaccctgcttgcccccagcactgtgtcccccaggccatctggagtgtacctgccccctttccataacctggctccaggtcagtgaatggcagttctgtccctcttctgcccaagctgacaaccctggggtcatctggactcctggcttttgcacacccagcccacaagcaggtgtcacccactccatcttctccccttctcattgctcctcatgccctggtccaactgtcttaagtttgagcctcctcctggttcccgcccacaggctgctctccaccctagtggccacatccaccacaggtcccagaggtaccctcccttccctgagaaagggccacagcgttaacatctgttgaggtcctgtgtgaccaccccccggattcctctgctgccacaaaggcctcttgctgccccagcctctctaccgaggctgtgcccttctcagatctctacactgtttctcctcagctcctccaggcttgtgccaacgtcatctgcaagagagacctcccttggctttcccaattcagcggcatcccctcgaccccaccttattctccctctctttgacctgcttctctttgcccacagcatccccaggactgcctcatccatttctctttcactgttggccctgcttgctgctgcctccaggtggacagtcgggacctggcacgtaggaggtgctgaccgcacacaccacgctctgcttactagcagattagtgaactctcttcaccacccttccagtctactaagcttgtaagtttttatgttttattttttaaggagaccaggaggagacataggtctcactatgttgcccaggctggcctcaaactcctgggctcaagtgatccccctgtcttggcctcccaaagcactgggattacaggcgtgaatcagtgcacctggataacttgaactttttttttttttttgagacaggctctcagtctgtcgcccaagctggggtgcagtggtgcaatcagctcactgcagccacgacctctcaggcccaaatgatccttccacctcagcctccagagtagctgggactacaggcatgcaccaccatgcccaactaatttttgtattttttgcagagacagggttttgcctattgcccaggctggtcttaaactcttggactcaagcgatctgcccactttggcctcctaaactgctgggatcacaagtgtaagacacccaatcggccttagcttgaacttcttttttttttttttttgagacggagtctcactctgtcgcccaggctggagtgcagtggcgcgatctcggctcactgcaagctctgcctcccagattcatgccattctcctgcctcagcctcctgagtggctgggactacaggcgcctgccaccatgcccggctaattttttgtatttttagtagagacggggtttcatcgtgttagccaggatggtctcgatctcctgaccttgtgatccacccgccctctgcctcccaaagtgctgggattacaggcgtgagccaccacacctggcctagcttgaacttcttaagggccaagacattatctcgtttatctctcaaatcccactgcatccattacagggatctcaactatccattacacagatgaatcactagtctatgctttggacaaaggcaaaacagttttcaaaagccctcccaagagaaaagtctctgttgtgttttacacattaatacctcagtttgaaatgttagcacagcttaatcacaagctgcagcatcctttggaactccaacaaattctaaccaactatactttgagtgaggactaccaatgattacgctcaccttctttttggacatgggacgaccccgaggcctgtcataggcaattcgaactggttcatggactagaagacaaaagaaagagacacatacacatacatgtgcttttcctaaattacttagagactgaagatcttgcagtctattttggctaacagttctctgatgacagaaggtgtcttaggctctgcatggcagctgctgagccccagctcctctcaagaatgaacatgtatgacccctggagtgagcagagacgggacacgctcagggtaggcagcttgggccataatgaagggttcactgagcggtgccttgcttttggaaagtctattcaaacctaagagtccccacatttataacaaaagatccaatacatggattattttccatgactacagaaatatattttgcttcaacaaaatatttgtgatactgtgccctcctagtttatctgcagctaattcactgggaaataattaaagtctggccaggcgcagtggctcatgcctgtaatcccatcactttgggaggccgagatgggcggatcacccgaggttaggagttcgagaccagcctggccagcatggcgaaaccccgtctctactaaaagtacaaaaactagccaggcgtggtggcgggagcctgcaatcccagctattcaggaggctgaggcaggagaataacttgaacccgggaggcagaggttgtagtgagccgagattgtgccactgcactccagcctgggcgacaagaacaagagtccatctcaaaaaaaaaaaaagaattaaagtctgcctaaaactttctagtgaaaaacaaccatgcttctcatatagagaaccacatcatatcattttattctattttttatgaaagggagattagcaagtctgtttttttttttttttttttttttttgagacacagtttcgctcttgttgcccaggctggagtgcagtggtgtgatctcagctcactgcaaccttcacctcccaggttcaagcgattctccagcctcagcctcccgagtagctgggatttcaggaatgcgtcaccacgcctcgctaattctgtatttttagtagagatgggatatctccatgttggtcaggctggtctcaaactcccgaccaaaggcgatcctcccgccttggcctcccagagtgctgggattacaggtgtgagccagcacacccggcgcaggtctggtttttatctcatcaactacccaaagaactgagagcttctaatgcagaaataaaaaactccacctccccccaagaagagcatacataacaagcactctgatacactacctgccatccgtgacaagtttaattatttacttcattttttttacattaatttttttttcttgtaaagattaggtctggccatcttgcccaggctggtctcaagctcccgggctcaagcgatcctcttgcctcagtcccgctaagctgggattacaggcacgagccactgcgcctggccccatgagaagttttgaaggatggtaaaggttatagtagaatggttagcatttcactgcaacaccaaatttttcaaacacaaaacatgaggactattccaaagcaggaaaaaccataaggccactgtcacatgtaaatgtgactgtctgaatgatgtagaacacacaggtgactgtttaacacagtcccacaatggggcaccattcactacaacttcacacataggttttgcagcagaagtcccatgtgaaagcacggtccaggcctgactgtggggagacagcttggagggcattgggggcacaggagtcatctgggccacggcgtgcccatcaaaaggccacatgcgatgcaattctatgtactgacagactaggaaagatagaatacctggggcttggaaaacagtcagtggttgctgaatcgggcaggggactgcaatgggacaagagacccgttctgggaacaggcttcagctctgctgtactggtgggttctcgcctctgcacagtcaacaaaattcaaatggtccacttgaaaagggtgcgtttcactgctggtaaattatacctcaagaacccggaacctccccacaggagagcaggagatggcctctcatggccgaggcaggtcccactgaccactgcctgggaccacccctgctctgttcccatctcactgtcatgacatgaagcagcttatcagcaccctgggccttccaggggctcagaagggcccccagctgacaaagtcacaggcaggaaaacagctgagatgacccaggcccatcccctccacagttggggatgccccgacctgaatccaggcaatcagggaaatgtccagcagcaagtagagtgccagaagccacagggtagcaaggaaacatgtccttagagcaatgccttcagaccactgggaaacatgagtgtcggctcacattttggagtggtgcacaaaactcttttggattaaaatgtctccacctgtctcttctaactctcacagcccaccaaccaagaactgtgctagaggcaactgtgccgacaggcgggcactcaccttttggctcctggatgagacacactctcttgggagctggaatcatgccaaccttcaatgacttgctgctgatcctcttccgagggaagcaggtacctgaggaggcctgtgacaaggcaggtgctccagccaggtcgtcctcggcagcctcgccgggaaggccgtcggcaggggtgctgccctcagacttgcccgcccctccaggagcgggggcctcctctcccccatcctcatcgtcctcgtcctcctcctcaggcatcacctctgggctctccagctcagcctcccgcggagggggctcgtcttcaaactctgcttccccttccatgaggtccacggggctctcctgagaacccgtggtgtcaccaccaccagtgtgaaggttgtgcggagatgacgtgaaacaaattgatggacatagttcaaacactttctttcgatagaatttgaaagcagaactattttggtcatgtagaaacctggggcacagaggaaatacattgggtaaccagatggaatctctcaacatttttatttgctgaaactgctgggattgatccaaggaaggtggaggtgggacaagggaaagaataacctgaccagtctctacgcggctatggcttgatggtgcagcctctcaatgatagaaaatttgaggagtactagtaacttaataaggagctagaattcaagaagcctaactgctttccaggggacagaggcggacgaacaaggtatgcagggcttgggaaaatgctggaatagagatctggcttgagacccatctcaccctttctggttacatcactggcctctctgggcctccatgtgcccattttgactctggttcctcccaggtatgagaagcatggagcgatgccaggaggagctgcacagttactgctggaacatgtgcaccatggaaccgtaaggtgccccccgaggaggctcctcacccctagcacttcccgctctggggcctgcagtccacctacatgggcgtggagatgaggcctctctgtgcctcaggggtctggtggccacctcgacttgtaaccacagctatgaagctgtggctggtatgagaaacttgaaacactcccgaaagcaccaaagtccacttggaccaaaggaaaaatggccctcgtaaggcaactcaacctcataaatgtgccaagtccccccagttagcatattaatatatcccaataaaatcccattctgaatcagggcaagatggttctaaagttcataaagaaaaataatatgtaagagtatctgggaaaactctgaacaagactcataaggggttccagccccaccaagcactataaaatgccccaaagcctctagagttaaacagcatagtagtccataaggcagaccaaaggaacagaatagaaagaccagaaacccagcatttgattaaggtaacctctcaaactactacaaaaaaggggtgggtctttcaaagaatggtattggaaaagctggacggctttataattattattacacatttttagagatggggtctcactctgtcgtccaggctagagtgcagtggtgtgatcacagctcactgcagcctcaaactcctgggctcaagaaatcttcctacatcagccacccaagtagttaggaccacaggcaaatgccactataccaggctaacaaacacacacacacacacacacacacacacacacacacacacacacacaccacacacacacaccacacacacatacaactaaatatcagcagaaacaaatgaatctgggccgggcatggtggctcatgcctcccagcacattttgggaggctgaggcaggcagatcacctgaggtcaggaatccaagactagcctggccaacatggtgaaaccccgtctctactaaaaatacaaaaattagctgggtgacacctgtaatcccagctacttgggaatctgaggcaggagaatcgcttgaacccgagaggcggaggttgcagtgagctgagatcacaccactgcactccagcttgggcgacagagtgaaattccgtctcaaaaataaataaataaataaaacggattgtatgacaactttataacataaccacacccacaaaatgaattaactcaataagcttgagcacattagaattaaattttttctaaaggcaaaagaaacacaaagtcatcttggcccatttacaagcatggctggatagcgtccaacaccttgcccagtattgtggtcaggatccagggctctccttccagggaaggacaggacagagtactctgaaggacactgctcagaaaaggctgtcacagatggggaggaatcacccaaaacccaacaagtactacagcccaagtacccaggctaatgcaaaattctcctttaaactgtacttttcattgaaaaaaaagaaagtgaaaaagaaaaaaggactcatgggatgcccccagctgccctgcactgagctgtcctccttatccaaccctgccagaggaaatcccacatacacagtggacaggtccgaccccgaggtctacagggcccagcagctccccaaggccactactgcctgtaaaaggcaaaacctgactgtaagcctggtcaggcttcccgtctgtaggtggtcagtgccccacaaggcaggtggtaccttagtgcaggacccagtcataagccaaggctgcggaggggagtagggcttggcttgtgcaatcaggtcccaagcaagttgaaagagtatgttctgtcaccactgaatcccataaatgctctgagaaatgcacgttttcaactgtaattttaactggatgaaggcatgactgtccaacaagctaggaccagcacgaggagttgagagccccctcagtagggttctggctcagtaatgggaagatgggtgcctcctaccggcagcctttctctggaggggacatctcatgtcaccccggggaaaaaccccaggggcagtgctggctcctcacccaggttttcttgcctatgggctgtgtgcttttgagctgagctccacctatccaaggaatggagagggcaaaggtacctgctcccagcatgagcacgccaccttatccctgtgtagaagtgcctgctgtcagacctgggcaagggctgactatcactactatcatgcagtgagcagcaaatcctcacctctctcccctcccctggccaactcctatttagcctttggatgcagattaaatgtccctctggggaggtttttcctgatgcccgagatgaaggcaggtcccctagaacagattttttttttttgagatggagtttcactcttgttgcccaggctggagtgcaatggcgcgatctcggctcactgcaacctccgcctcccaggttcaagcaattctcctgcctcagcctcccccgagtagctgggattacaggcacctgccactacacccggctaattttttttatttttagtatagagacggggtttcactatgttggcaaggctggtctcaaatgcctgacctcatgatccacccgcctcagcctcccaaagtgcggggattacaagcatgagccattgcacctagcctttttttttttttttttttttggagatgaagtctcgctctgttgcccaggctggaatgcagtggctcaatctcagctcactgaaacctccgcctcccgggtttaagcgattctcatgcctcagcctcccaagcagctgggattacaggtgcttgccaccatgcccggctaatttttgtatttttgtagagatggggttttagcatggtggccaggctggtctcgaactcctgaactcgggtgattagaacagatctttctcccttaggcccctggctcagctgaagtgaagtcatgacttactcctggtataacccccatagtaggaatgcattggccaggctgtgggctggctcaggacatgcttgtggcgtgaacacactcaaatctaaagggtgtaatggccagttgcagtggagcacacctgtggtcccagctactctggaggctgaaacaggaggatcacttgagcccaggaattcaaatccagcctaagcaacatccttagactttgtctctctgagaaagaaaaaggtgtgatgagacccgggggggtacgtaccacaggtcagggttatcggtgctgttttctatgctgaattgttcgatctctggtcccacctgagcaacaaatctagccagtttctctgcagtctccattgtcttcatgtcaactacaaaacataaagcacctgtcaggcatgactcctgagctgctgctccccgtgtaaacactgcagggttgtggaggctgattataaagatggcctgcatgtcccctccctgtagccttgcccttcgtcacatgtggaccctttgtcaccaagaagtgaactctgtgtatccccaccttgaatcagggctggtcctgggactcacatcagctatagaatgtggtggaaaagcccattgccagttccaagcctgggccttggaggacttgagtacttccactgtctctcctgaagccccaaccccaattgccaggtgaacaaacatgggctggctgctggggggatgacaggcatgtggcccagccacaccatcatctcagctgacagcctggacacctgccactgaccgcagacatgtgtgggctagctcagcagatgacccagccactggcaaattcacaataccggacgcctcctggttggtttgtttggtttttttttgagatggagtcttgctctgtcgcccaggctggagtgcagtggtgagatcttggctcaatgcaacctccgcctcccgggttcaagcgattctcctagctcagcctcccgagtagctgggactacaggcatgtgccaccacgcccagctaattttttgtatttttagtagagatcgggtttcaccatgttgcccaggctggttgcgaactcctgagctcaggcaatccacccgccttggcctcccaaagtgctgggattacaagtgtgagccaccacgcccagctgatgcctcctgttttaagccacagtttggaacggctcacgacacagcaacacctaaataatgcagcagttgtggacacttttttgctctctccttcccacttagtgcttaggaagcactggccagagagcaggcctgtggtacagagagaaagaaacagctaaggtgacagaagaaacagaaggggtgaagttagtcgattcggaggaagcagtgcaggtcagcgaaccccaagaacaggaactgtggagaccctggggatgaggaggcgcaatgagaacaaggcagtcccgaagactatcaagggaggccaggatatagcaggacatgggatcccaagttcaggcaatgcaccgcccacggccccagcagcaggaccctgtcggggagcacgaaggcatggggcagcacctcataccagctccgctctcagaagaggaggagggagctgcaggactcgcatgcagctctctcaagaaagcaagagagaaagcgccaacatgtacacttgtcctggccaggtccctagagcttttatccactgccttgcctagattgcaggcccccccaattctaaagagaccctggagatgggagagtagggactggggcccagaggagggggacaggagtgagcacccactgtcagcagatgggcagggagaagaggtctgaggtgcttcagagatgtccactcctgctggcttgggggatgggcctgaggcttctaagctggggtcctgaggagaaggtccaactgggtctggcgggcagtccttggcagcatcatttctgtctggcagggatggttttgcctgtgagaggcctggagcctgccggccgtggtgtttcagcctggtgcctgaggataggagggtctgggtcccggtggtcgctctcctcgccttccagccccggagcccttgagcacggaggagcccccgccgctgccacggaaggagtttcttcttgaggttgcggacagcccgggagtacagcatggccctcactgcacagtctgctgaggtcggcttctggtcggctcctcgcaagttctcgctcatccgctgcatttctgccaacttcagcttgtaatatttatactccagactattttcatcagacaaaaacctagataacaaaacaagcataacgggacatttatgaaaacaccaccaggtcccaaattgttccttcaaacacaaaccctttctaagtggccaactcctcactgtcctctcctgtctcagaggctctgcctggctctactgaggacccagagctaggcccaagacagctgccctgctaagagtgaccacagggcaatcgggagtttgaactgagttcctccttgatttccatcagcagcagccgtgagggagctcccagctcttgatggcctggaaacacaaaccagtcaccttggagccatagcaccctggcaggcagaattgacaccttttaaatggcccagccaggatgagtgctcggtgagcttttgactgcatcaaggaaagtgtgatgtgaaccacaagagaacattaaccaaggagcctgcggcccaggtgtgaaatcttatgacccagtcatcatgatgagaacagtaaagagaaggttgagctacatgtactaacagaaaaatattcagctgggcgtggtggctcacacctgtaatcccagcactttgagaggctgaggcgggaggattgcttgagcccaggagttcaagaccagcctgggcaacaaaacaagatcccatttccacaaaataaaaaaattagccagggtggtggtgcatgcctatagtcccagctactctggaggctaaggtgggaggatcacttgagcccaggaagtcgagaggctgtggtgagctgtgattgcaccactgcactccagtctgggcaacagagcaagaccctatctttaaaaaaaaaaaaaaccttctccttctagtgtctttacttttttcatcattttccttctagcttcatgagttgattacagctcaccgcagcctcgaccttctgggttcaggtgatcctcccacctcagcctccccagtagctgggactacaggcgcgcaccaccacgcctggctaatttttgtgtttttggttgagaggacatttcaccatgttgcctaggctgatctcaaactcttgggctcaaggtagccatacgcctcagcctctcaaagtgctgggattacaggtgtgagccactgcacctggcccactatttctaataaagtcacctgaagtcactctttctcttaagtatttttatgactgcatctggtatataatgttcttcttgccacttccttctaaattgcttctaatttcagctatgattacccttcactcaaaagttattcagaaacatgttttattttggttgttgctggtttctagtttgctgtattggcataatgtggcccacgtgaatttcctgggtgtgctgtgattttctctgtgatttcatacataacgaacttttaagatgggcgtggtggctcacgcctgtaatcccagcactttgggaggcggaagcaggtgggtcgcttgagcccaggagttcaagaccagtctgggcaacatggcgaaaccccatctctttaaaaataaataaataaataaccaccccacaacaaacataacagacttttgtgaatatttgatttcagtttgtgttaaagaagaatattgcttagtaagtatggcagtatttcaggtggctttcagattgtttgatattaagtagcgacatatcagttattagatgaggttccagattaccagtgacaagccaactagaagtaaggtggctgtgtgttgcacagcattggcagcactgtgtgatgtggcatgtccctggcaggcagctccatacacaagctcctgctgacactgttagccagttgaggtctgtctggacctgacaaaacgactgagtaccggctccactgctgccctggcactctgttgggctaacggtggcatcctgcaagatcatgccctaataagcaatagcgctcaattaagagaatgctgaccaacatgggcactctggttctcaagtcaaacacagccccagcaaggcaactcctcatcaagggcagagcgcagaatcagggccaggtgacctgactgccccagtcactcatggctctgatggctttccttgttcctggatggttctgatgccaagtgcagtccgaggatgtcagtcccaaatgcatctcccaagttccagtggaacataacatcaagaacagagaacactcaacaagccagtctgctggcttcaaatctcagcatagccacttattagctgggaacctttctgtgcctcagtttctccatctgtaagacagggaagatgataagcagtagctacttcatcatacagctgtgaggcctgcgttataagcttttcactaggaggcaagtgctatgaaaactgcctagtagtcattaaccgctcaacaaatattagcagattgtctctgtttatgctcatttcctgtgttataaaatcttccacaaccttatttggattacgtcgtctacgcatttcagagaaacattaatgtctcctaccatggttttggattcatccaattcctcttatcatggttttggacttaaatgatttttttttttttgagacggagtctcgctctgtcacccaggctggagtgcagtggcgcaatctcggatcactgcaacctctgcctcctggattcaagtgattctccagcctcatcctcccgagtagctgggattataggcacccgccaccacacccagctaattttcgaattttttttagcagagatggggtttcaccatgttggccaggctggtcttgaactcctgatctcaggtgatctgctcaccttggcctcccaaagtgctgggattacaggcatgagccaccgcacccagctctggacttaaatgatttctaaaggttgtttatttacatggctcaaagctatgtagtgcaggcaccaagattcacaatctatatgttcgtgatgactttcccttttatcaggaacttcttttgctccttttagtgctgttctccttaaagtcttttttgcctaaacaattctctacatcctttctttttggtagcgttcacctgctatgcaatttcccatctctgtgttttccaattcctgtgtttttgcttctttctctctatagtagtacggaagttatagacctcacttctgttcctttaatggctaatcgacacacatacctaaacttttattttgtatcaatatccagaattaccctttagctctatcctcatgtcaaacaagacaaaggcctgcacacctacctccctccttccccttgtgcctcacatatttagatcatctgggattttagtttcttttatttcaccccaaacatcaattatttagattttatgttaactttggggtgcttggacaatcctgctgaggctagaccacagggattcttagccacttgttttcctgagtgtgtgaacacgtaggacctggtgggctctccctggagagcatggtcagggctggcccactcccaggggacaatttagaagatgagagaaaacaaagtatgacatattccttcagctttatatcctgcactgttgttatcattttctaggcttgatgctttgcactctctcatagaaaaggacggaagcctgccccttggtgttccaaacaaggaagtaaagccatagtggatgtgtctgtctatacttctgattgattcattgattgatttgagacggtgttttgctcttgtcgcccaggctggagtgcagtggtgcgatctcagctcactgcaacctctgcctcctgggttcaagtgattctcctgcctcagcctcctgagtagctgggagtataggcagccaccaccatgcccagctaattttttatttttagtagagatggggtttcatcatgttggccaggctggtctcaaattcctgacctcatgcggcccactcgcctcggcttcccaaagtggtgggattacaggtgtgagtaaccgcacctggctcttctgacatctttagtgcacgacacgaggcaggtcacctcggcaaagaggcaatggccagttctgtccacaaggctccagtgggaacaaatcatgcttgtggggtgtgagggtggaaggtctcaaatctctgctggccctcagagggtggagataagaagcccttcttatatctgcctcctagaggtctgactttttcacttgctaactaataaaaagaatttattaaggctggacatgatggctcatgcctgtaaccccagtgatctgggggatcgcttgagcccaggagttagacaccagcctgggcaacagagcaaaaacccatttcttaaaaaaagaaaaaaaaaaaaaagctgatagctgaatgcggtggtgtactcctgtagtctcagctacttgggaggctgaggcagggggattttgtgagcccaggttgaggctgcagtgaactatgatcatgccactgtgctctagcctgggcaacagaatgaaaactcatctctttaaacaaaaaaaaaaaagaacttattaatccacatatatcttcagagaatgtcaatggtcatgcataaaactgttcagtcaagaaaaagcaacataggcttattaagagatacagaggtaagccaggtgcggtggctcatgcctgtaattccagcgctttgggaggccaaggcaggaggatcatgaggtcaggagattgagaccatcctggctaacatggtgaaatcccgtctctactaaaaatacaaaaaaattagccgggtgtggtggcaggtgcctgtagtcccagctactagggaggctgaggcaggagaatggtgtgaacccgggaggcagagcttgcagcgagccaagatcccgccactgcactccagcctgggggacagagcgagactctgtctcaaaaaataaataaataaataaataaataaataaataataaaaagagatacagaggtagccgtgagaagtagtttgaagaactaagtgactgccttcaaggagtggaacatggaaacaggtcacagcagaaacatttggcttttcattatgcgttcaattgactgttttgttaaatacaacatacaaggagcattttgacttaagaattcaaacatgcacaccagaaacctaagtttagcagtttctttacttattgctgtgcttttgtatcacactctttcctcttacagtctcttggtaattccttctcttttttttgagacagagtcatgctccgttgtacccaggctggagtgcagtggtgcgatcttggctcactgcaacctctgcctcccgggttcaagtgattcttgtgcctcggtctcccaagtagctgggattacaggcgcctgtcaccatgcccagctaattttttgtatttttattagagacacggtttcactatgttggccaggctggtctcgaactcccaacctcaagtcatctgtccccctcggtctcccaaagtgttgggattacaggcgtgagccactgcacccagccaggtaattccttgtgaaggagtttttggatgataaagtctctgggaccaactcctaaatctttccttcttcaggatctattctatcagccaaccgctgagatttttatttcaatctatttttcatttccaagatccttaatagaatcgttttcatagcaaccagtgtctgtttcatggatacaatatactcttattacctgagactattcattgcacatacatatttatagactacacctcctctttctcatagtgactctgtcttctagggtgtcaggagttggttgagtttggtgatgctctttcatgatactggtttacctcaaatatcagttcttagtttgatgcttatttctgggactacaggcacccgccaccaggcccggctaatttttttttgtatttttagtagagacagggtttcaccgtgttcgccaggatggtctcgatctcctgatctcgtgatccacccaccttataggtgtgagccaccatgcccggccgcttatttctgattttgtaccctgccctgccccctatccaaacatacccctgactctggcttccgtctgctgcccctggttatcagtggtcatgagaccactgggccatgtgcaggggtcatggggcagaggcaccagcccccaggcctctcagggcctcctattcctccagcctaatcaccttatcaaccacctgtaaagtgcccctgggccttctaagtctggatgccttcttaccaagagggtcggtatctgcttgcatctgtcaatctgacaatccttcaacatgcacactggttcagaccacagaccctggatttgaatctcaactctgcctcttactagttgtggatcctcaaggcaagagggctcttggagcctcaaagtttcttgtctgtaaaataagcatagcaagagacctgcctcccaacgttgtttatgaggattcaaccagctagtgcttaaatcagtaatgtgcttagaacagtaccaactgcacagaaggcacaagtgtttattaaataaaaagtattcaataaatgatgctgggacaattaggttatttgggaatttttaacttttaagttacatgcctacctcattcaatacatgaaaataatccaaactcaagaattttgtaaaaataaaaccacaataagctccaaccttccccttggtaaatcatggtgggtaggaccaaagacatggaaatgtatgcctttcaagcatctttagtaattacaacagcaagcatagcaagtccagtatgggtacaatctgactaccaaaaagggcacactcaggaggtcaaggctgcagtgggctgtgatagcacccctgcattgcagcctgggcaacagagtgagatcctgtcactaacaaaaaacagaaaacaaaagagggcacagcacacctacagagtagcagtgagaaagtcaattagtacagataacctatggagagtaatctaatgataaacatcaatggtctccatcaggggcagctctgcctgccatgggacaccaggcagtgtctggatgtattctgggttgttactagtgagacagaaggtcctactaacatcaaacggatagaggccacagatgctgctaaacagcctgcaatgtccaggacagctccaaccctaatacagaatgatccagcctcagtgctgcagctgaggctgggcgcggtggctcacgcctgtaatcccagcactttgggaggccaaggcaggcggatcgcatgatttcaggagttcaagaccaccctgggcaacatggtaaaaccccgtctctactaaaatacaaaaaattagctgggtgtggtggcgggcacctgtaatcccagttacttgggaggctgaggcacaagaattgcttgaacctgggaaacagaggttgtagtgagccgagatcacaccactatactccagcctggcgacagagcaagattccgttaacaaataataataataaaaataaaaagtgctgcagctgagaaactgacataaatcaaaagcctctaacatgagctttaacccagcagtttcacgcccagatatcataataaactgccagaaaggtaggcagaaatacaatcaaagcactgatcatcactttttttttttttttttaagagaaatggtgtctcagcccagcacagtggcttacgcctgtaatcccagcactttgggaggccaaggcaggtgggtcacctgaggtcaggagttcgagaccaacctggccaacatggtgaaaccccatctctactaaaaatacacagatttgagaccttccaccctcacaccccacaagcattatttgttgccactggagccctgtggacagaactggccattgcctctttgctgaggtgacctgcctcatgtcgtgcacctgtaatcccagctacttgggaggctgaggcacgagaatcgcttgaactcaggagacggaggttgcagtaagccaagattgcgccactgtactccagcctgggtgacagagcaagactctttctctggcttgttctttactttctctaataagaaagtactatatttaggacgcaaactgtaattttaataagttgttcggccgggcgcggtggctcacgcctgtaatcccagcactttgggaggctgaggcaggtggatcatgaggtcaggagatcgagaccatcctggctaacactatgaaaccccatctctactaaaaacacaaaaaattagccaggcgtggtggtgggctcctgtagtcccagctactcgggaggctgaggcaggacaaaggcatgaacccgggaggcggaggttgcggtgagccgagatagcgccactgcactccagcctgggcgacagagcaaggctccgtctcaaaaaaaaaaaaaaaaaaaaaagttgttctatttacataaagaggcaattaagcaaaagacagtttaacaaatattagcaataaattgcaaacaactgcaatgatgtattactaatcttactacccttactctgtattctctgcatgcacatctcactgcatccttaaaacagcccagcagggacttggagctgtagtcacaggtgagagaaggccacccacccagctggcctaccactggtctgcagcagagctggggcttgctgaacccacataaatctgagccaccctcatgctcttctcactggagaacaccacttgctcaagtatctcaccctctgctctcaataccatcagagtgacccaaattttgccatatactccatgagagggattcacagcgtggacatttaaagacctaccagtaagcagggtcctctttgagaagagttctctctttgggagacaggctgccttcgatgacacgtttcacaagctggtcgatggtgcccactaccctgtgatctgctcgctgggggacagctggaacacacagaacagcttctctgagaaatatgctgaatgtgggctctgagaagacgaggatagttgagtagttgggggcttagtgctgaacccaagcaggcatcaacaaccgaaatcctcattcacaagacaccagcattgaaaagaggaaaacaaccaatatggaaaatctcctcctaaaaaatgtaacagtataaccactaggagagaaacagtcacagctttcaatgactggacagagcaatttatgtatatgctctagaaaaagaaagatatatagcaatttgatatcatttttcacatattacttaataatttgagtgttcataacattaaagtggaaaatataaatatctagtataaaatatacaaaaatgtatctaggttatggttctcaatataaaggtgggaataaaaaatataaatatggatacatagaaagaagactataaggaaatatgttaggaaatatgttaacagaggttatagggggtagaattatcaggaatttcattttccttatgctttaagaacttaaaaaaaaaacttgtgttttgtaatcagaaaatatatgtatcaattcacaaaaaattttctccaattaaaaaaaaaaaagaaaaaaaaaaaaggtcagccgggcacggtggctcacacctgtaatcctagcactttgggaggctgagcggggtggattgcctgagctcaggagttcaagaccacactgggcaacatggtgaaactccgtctctgctaaaatacaaaaaaaaaaaaaaaaaaaaaaattagccaggcatggtgggatagagcgagactccatcacaaaaaaaaataaataaataaataaataaaaaggtcagtgatcccaaattacatgttcacagaaaatatctgctgaatgtataagaaacaaattttggccaggcacagtggctcacgcctgtaatcccagcactttggaaggccaaggcaggcggatcacgaggtcaggagatcgagaccagcctggctaacacgatgaaactccatttctactaaaaaaatacaaaaaaattagctgggcatggtggcgggcgcctgtagtcccagctacttgggaggctgaggcaggagaatagcgtgaacccgggaggtggagcttgcagtgagccgagattgcgccactgcactccagcctgagcgtcagagtgagaccctgtctcaaaaaaaaaaaaaggcaaatttttttttttgagatggggtctcactctgttgcccaggctggagtgcagtggtcccatgacagctcactgcagcctcgaactcctaggctcaagcaattctcaggcctcagcctcccaagtagctgggattacagacatgcgccaccacgtacagctttatttttttgtacagacgaggcttcaccacattgctcaggctggtctccaattcttgggctcaagagatccaccctcctttacctcccaaagtgctgggattataggcatgagacaccatgccctgcccaaaatattttttaaagtgtgaatgtcctccaatatgactttaaatttacaatgctgccagcaacacagaacatgtttcttcgaatggtaagattgtttagtttcctaacaattgtctagttttaaaagtacagaatgatggccgggcacaatggctcattcctgtaatcccagcactttgggaggccgaggcgggtggatcacctgaggtcaggagttcgagaccagcctgaccaacatggagaaaccccgtctctactaaaaatataaaattagccaggtgtggtggcacatgactgtaatcccagctactagggaggctgaggcaggagaatcgcttgaacctgggaggctgagatagcggtgagccgagatcatgccattgcactccagcctgggcaacaagagcaaaattccatctcaaaaaaaaaaaaaaaaaaaaagcaaagaatggtctatttgttcagccactcaactcaattaaaatcactgctgaactagcgaggttttccagtttgttctgtaaatgattgcatagtcctgtgcccgtctgtgtccatgttgcagctttcagcttattttaaacactagtgtgagctcctcacacatgatgagtcaatccttcaactgccacgttattccaagtatgtcccctatgaaactgctttttttttcatggctctctttttacagagctactagttttacatgattttacaaaagatgttgaggtttacagtcagcaatgaaatttagggacccctgcaaatttggtcatctttagctaggatgaccacgaacaagggtcagaaagtgggtcacagctttggcccagcaatcctactcctgagaatgtaccctttcaaggagaattaaaaacaataaaactaacagtaataaccaaagcattcaaccaaagatgtcattccagcattttttttttttttctagatggacttttgctcatcacccaggctggagtggagtggtgcgctctaggctcactgcaacctccacttcccaagttcaagcatctctcctgcctcagcttcccaagtagctgggattataggcatgtgccaccatgccaggctaatttttgatttttagtagagacaggtttcgtcatgttggccaggctggtctcgaactcctgacctcaggtgatccacctgcttcagcttcccaaagtgttgggattatagctgcgaacgactgcacccagcccattccagcacttctttttttcttttttttctttttttggagacagagtctcgctctgtcgccaggctggagagcagtggcaagatctcggctcactgcaacctctgcctcctgggttcaagcgattatcctgcctcagccttccgagtagctgggactacaggcacatgccaccacgcccgactaattttttgtatttttagtagagacggggtttcaccgtgttagccaggatggtttcgatctcctgacctcatgatccacccgcctcggcctcccaaagtgctgggattacaggcatgagccactgcgcctggcccattatagcatttctaacaggaacataagcagcggtggggcagcctcatgagatgtgggccctgctgccacctatcccgctatccagacagggaactgaggcttgcagatgctaactacatgtgaacccaggtctgtctggcttcagaaacctctagtaaaaggcagcatgagtccagcatcaagggaaaggtgaggtaatttacattaggtcaatatcaggatgtagcaaaggctgtggaaacaaagagggctttctggcaatcatgtagaagagcaggcggtagcattttcagtccagcatgcctgcagctgcaggaaaacagggggaacatcaaagactgtgggagggtaagtgggtgggttataaccactttaggttatcggtgacttttcttccttcatacagtatgccatcactttgtgagggattggggagtagggtcccttaagccctgagcctacttctggaaggatccctctctgggagtaggtgtggccacctgtatgtggtgggacctatctagtgtctagtgctgttggggcttcctgagggtggtgaaagagcaaagaaagtcaggaacaaatgagacttcgccactggactgggggcaatggaaggtgaaaaccacatcgtgggaaaagtgctttctccctatcacaagagttaagacagcatgattaccatgtgtgctcgtgacctctgggatgtctgggctgtgagagtccattctgggagcttaggaggaaggaagagggaaaccaaacagctcatcacttctatttctcctccttggccttttcctctccccagaaagccaatgataactgctaattagcaggtgtacttaagtgattcaccaactttagccagtctacaaaagtgagtagggcgaaaaggtgtatccactatgtggaatgacctggctgttccctacacatccctcaatacagctcaagcacgacctctccaactttccaggctagactggagcctctcctgtgtcgctttaattctagcacaggggtgactgtttttttgttttggtttattgagagacagggtgattctagcccaggctggagtgcggtggctattcacagatgcaatcataggtcactgcagccttgaactcctggcctcaagcaatcctccctcctcagcctcccaagtagctgggatttcagacatatgctaccacccctggctcacaagtgactggtctttgtgattttcttccctcaggagcctggggattcctcagagacagtgctctgtgtcttttctcccttctagtaataccttgtggggacatgttggaacaagggttccaggccaggtgcagtgactcacacctataatcccagcactttgggaggctgaggcaggtagatcacttgagctcaggagttcgagaccagtctgggcaacatgattctctacaaaaaaatacaaaaaaagttagccaggcatggtggtacatgcctatagtcccagctactcaggaggctgaggcggaaggatcacttgagcctaggaggtcggggctgcagtgagccatggtcatgccactgcactccagcctgggtgacagagcacgaccctgtctcaaaaaaacaaaaacaaggaaagaaagtcaacccttctttttttcaaaggttaaaaagaaaaaaaaaggaacaagcgttcttaaccttggctgcagaaaggtacgaatcccccggatgatataggtaaaattgtgcgtgaatagatgagcattttttctggcaatggccacagctttctaccaaattcccagagaggtatttgacctaaaaatgtctaaaaatttttatttttctgagacagagtcttgctctgtcacccaggttggagtgcagtggggtgatctcagctcactgaaacctccgcctcccaggtccaagtggattctcctaactcagcctcccgagtagctgggatttcaggtgcgtgccaccacacccggctagtttttgtatttttagtagagatggggtttcaccatgttggccaggctggtctcaaactcttggtcttaagtgatctgccgcctcagcctcccaaagtgctgggattacaggcatgtgccaccacacccggctgtctaaagacttctatggtaaacagcagattcctaatacacattcacagaatgaatggcagacatatattggccaatgtgcgttttctactaaaatcctgatatgtttccaattggctaaagaacttctgtgtaaaaaaatctcgaataaaagacattaccaaagaaacacgaaaaacaacaaatagaaactttggctgatttccttaccatcactcagactacttggagccttggcctgaatttcaggtttcgtaggaggaatcattttctcctcctctcgcatcggctctggttcggctttcttaacctggaggggacatccgctgctgactagccaggccttcaggtggtctatgtactctcgcccaaacaaagtggagtcttcgaagtttggaaacgcagcaggtgagggagctatatcttgcaggccgacagcttctaagattttctcctgccggaaagaagaggccaaggaaaatgtctgtcccaaaagggccaaagacttccggcagagagagttggtggtttctagggcaagagccaagtccagggggttactgagggtcttcatcttgacacttagctcgtaggcattgcaggccataagcaaaggtgtgacactcttcagaagccggtcttgaagtctcattatgtacttgtcaaaaggctttatgatttcaaaaaagcaatttttggtcttcacagcacctttgtctaaaagcatgtttaaaaactcattatcaactctgggtgttttcaaagcagagtgctttaaaaatttgatagtaaaaaagcaaaaatctctgtgctctggttttaaggaacatttgaatgaggcaagcattttagcacaggtttctgtttcaagttcaaagagagtctggaaaagttgggaaaatttaatatcatcttttatggtgtggaatcctgcccatttgattatttctatcccaaatcttgaaaaaacatcagacttatctatgatgtcaaagctcatctttcttctggggagccgaagattcttcagatccagccccagagggatcttctgaatggggaactggatatcttctgtccctgggtttgtccccagggtcacatcaggacttggagtgtttttctggatttggttagtgccctgagttttgggagtaatacgattcacggtgggtattttttttgtgctcacatttctcaatgtgacaagtttcccaacaccccccttagctgtgagcaggccctgagtctccccctttcctaggagggaaccttcctggtcaacgatgtttagagctcgacctctggcctggacttgactgccgcccctaagcacagagtcagcctccccaggatggtccacgtcataatcccgactctccttctccaaacactctttctcaatcagcctggaagatccaaagtcccccaaaactgcagagggaccaaaactatactcctgtgaccaagaggactcttgagaaactggatggccaaagtcttgttcccaagaaccacggagcgcaaatttccagtcctgagaacggaaatgccccaatttccggtggccaatgacctggtcccgagaatcagagtgagaaaattccagatcccggccacattctttgcgaaagtagctgtcatcactgatggaagggttgcttgatctgaaggaaggccctggaaatacgtcacttctcaggccttctcttccggcatctctagagtgagctacagatccactgagggagtatctgccatcgctgtggacgtcatcatacatctctgctctggatcttgggactgcccttaagagatctgaaataaaccatccaaaaaaaaaaaagaagaagccaaaagatactttagaccagagaatgcaaacagtgcaaacaaacagtccacggatcaccaggcagcaaaactgctttatacacctcagtgctttttgccaatctgtatttgctgccaacatttaaaatgcgtgtggtgtcacttaaaaatctggatcgactacttactaaaacagaagacctataagcaccaagcctgagtttgccctgatgacgtcaacccaggctgggcagtagcagcctgacgggcaagacacagactctctaagttggcaccaacagccctcgctcattcagatccccctactctctagccatctgggttgacaatccctcttttagtctgaggaaagggtgtttggtccccaaataacctggatatttttactgcaactggagcacttctgtgtttctacttctatctcagaacagacaggttttattgaggctacctgccttcactgcctcttagaaggaagtctcagcccacagtgccaccgtgaggctagaggaaccatagctaacaccacacccaccacagctgacccaaagctggctgaacccatccctcggaaaggtcggccaggccaatcaaccctctctctggagctgaaaaaccacagaccgaggcaggcaggagggaaggcagaagcttaacaagatacatcaagagaggccatgatggaaactgaacagtgcccaattctgtccttctccatgtagaaaaggggaaatgggccaggcacagtggctcaaacctataatccctgcactttgggaggccgaggtgggaggatcacttgagcccaggagtttgagaccagcctgggcaacatagcgagaccctatctctgtcaaaaataaaaaagggcggaggggaagatgtacttgcatttgcttaatcacacatggagaaactgtaagaagcgaggaagagaagtgaactacgggcatatgagaacagtgggcctcagggagagttttcatggaatgcctttctttctagcttttcaatcagaatcgatgacctagttaaaaaaaaaatcaaatgaacagggaaggagaggtgccaggaggtagcaataggttaagaggccacaggaagccaaagtcgtatataaatcctagttcacttgttcaacaagtacaaactgggcacctactgtgcgcaagcactgtactaggcactgaagttacagcaagaaaatgagaactcttccaaacttgtcagttgagagagccagacaataaacaaaaatatatcagatgcaagttaagtaccaagaagacaaatcaagcacgtgggaacctgaggaggcaatgacattttgagacaggctagtcaaggagggtagctctgacacttttttttttctttttttttttgagacagagtctcgctctgttgcccaggctggagtgccggagtgcaagggtgcgatcttggctcaccgcaacctccacctcccaggttcaagcgattctcctgcctccgcctcctgagtagctgggaatacaggcacccgccaccatgcccggctaacttttgtatttttagtagagacagggtttcaccacattggccaggctggtctggaactcctgaccttgtgatccgcccacctcggcctcccaaagtgctgggattacaggcgtgagccaccgtgtcacgctgcatagctctgacactttatctagcagcagtggcctggcatgaggagccagaccgtacagttacaaagggaagccttccaggcagagggggaatgaggacaagaccctgaggtgggaccagtagggggccaatgtagacagaagggaacacagggaatgaaaggccaagtggtaggaaggcagctcccaaactctgctactggagccccagggaccacctccccagacattcttacttaattaaataaggggatgacctgggcatcagggtttttaaaaggcccccaggtgacgctaacgtgctacaaagttagggaaccactaatataagagacacaaatggagaaggagtaccagatccaagtcgggccctcagtggtactctggaatttactctgggagagacagaaggctagtgaagagttctaagcagagggatgatctcactggctgctgcacagggaacagattaaaggagatgagcacagacgtggatgttcctgcaagaaatccactgtgataacccaggtattgatgattggtattgatggcatgattagggagggaacattagtgacagagagtgatggctggattctactcaagagaattttctcataccctttatgaggagatgaaaagttcagagtggagcagagaaacagagaaaggctaaacgatagactgctttgcaacacagaaatgttccagaatcacctagcatactgctaggtttctagtcctctcccacccacggccccctaatctgtcttttttttttgagacggagtctcgttctgtcacccacgctggagcgcagtggtgcgatctcggctcactgcaacctccacctcctgggttcaagctattcttctgtctcagcctcctgggtagctgggattataggggcctgccacatttttgtatttttagtagacacggggtttcaccatgttggccagactggtctcaaactcctgacctcaggtgatctgcccaccttggcctcccaaagtgctgagattacatgtgtaagccactgcacctggccgtctttttttgagacagggtctcactctttggcccaggctggagtataatggcacaaacacagcttactgcagcctcgacttcctgggcacaagcgaacttcctgcctcagcctcccaagtagccagggccataggcgcatgccaccatgcccagataaatttttttttttttgagacggagtcttgctctgtcacccaggctggagtgcagtggcacaaccttggctcgctgcaacctccgcctcctgggttcacgccattctcctgcctcagcctcctgagtagctgggactacaggcgcccgccaccacgcccggctaatatttttagtagagacagggtttcaccgtgttagccaggatggtctcgatctcctgaccttgtgatccgcccgcctcggcctcccaaagtgctaggattacaggcttgagccactgcgcccggccattttttttctttttttttttttgagatggagtctcgctctgtcgcccaggctggagtgcagtagcgcaatcttggctcactgcaggctccacctcccgggttcacggcattatcccgcctcagcctcccaagtagctgggaccacaggcacccacaaccacacctggctaatttttttttttttttgatttttagtaaagacggggtttcaccattcacaggatggtctcgatctcctgaccttgtgatcctcccagcactctgggaggccgaggcgggcagatcacaaggtcaggagttcaaaaccagcctgaccaacatagtgaaaccccatctttactaaaataaatacaaaaaaattagccgggcatggtggcaggcacctgtaatctcagctactcgggaggctgaggcaggagaatcgcttgaatccaggaggcacaggccgcagtgagccaaaatcacgtcactgcactccagcctgggcgacagtacaagactctgtctcaaataaaaaaaaaaaagaactagtagagcttaaacctgggcagcggtgacagggatggagccaggaaatggatccaagaacctgtcttggggctgggagcagtggctcacgcctgtaatcgcaacatgctgaaggcagaggtgggaggatcacttgagcccaggagttgcagaccagcctgaaaacatagcaagactccatatctattaaaaaaaacaaaaaacaaaaaaaacaaaaacataaaaaacaccaaaaaacaaaactgggctgggctcggtggctcatgcctgtaatcccagcatcttgggaggccaaggcaagtggatcacctgaggtcgggagttcgagaccagcctggccaacatggtaaaacctcatctctactacaaatagaaaaattagctgggcgtggtggtgcatgcccgtaatcccagctactcaggaggctgaggcaggagaatcgcttgaacccaggaggcggaggttgcagtgagccaagaggcggaggttgcagtgagccaagatccctccattgccctccagcctgggagacaagagtgaaactccgtctcaaaacaaacaaacaaacaaacaaacaataaacaaaactgtcttgaggtgggtcggggaggatatccagtgagaagctccagataactacataatgatgactgacagatcaaaacattatcccctgaccaagtgcagtggctcatgcctataatcccagcactctgggaggcagagatggaaggatggcttgagcctaggagttcaagggtgcagtgagctaaaactgcgccactgcacttcagcctgggggagagagtaagaccctatcacaaaaaagaaaccaaaccaaaataaaaacctttacctcctcctaaataaggaaactaaggatcagaggactggtattatttgcccaaggtattgtaatcttcctgccttggccctaagatacacccctaccaaaacaacaactacaacaacaacactttattttaccttgagctttaaactgaagagtttcgcttacagcctcaccactggcatccatgtgatatcgtttggctttttcttgtaatacagcatcaaaagtctcctgtgtaattcgtctggctgccatgttattttgccctatggtgagagagaaaaaaatacactaagagcaacaacttggagctgggcgcggtggctcatacctgtaatcctggcactttgggaggtcgaggtgggcggatcacctgagctcaggagttcgagaccagcctaggcaacatgatgaaactaaaatacaaaaaattcaggctgggtgtggtggctcacacctgtaatcccaggactttgggaggctgaggtgagcggatcatttaaagtcaggagttggagaccagcctggccaacatggcaaaaccctgtctctactaaaaatacaaaaattagccgggcatggtggtgcctgcctttaatcccagctacttgggaggctgtggcaagagaattgcttgaacccaggaggcggaggttgcagtgggccgagatcatgccactgcactccagcatgggtaacagagtgagactccgtctcaaaaaaaaaaaaaaaaaaatttcaccaggcatggtggcacgtgcctgtaatcccaaatactcaggaggctgaggcatgggaattgcttgaaccagggagacagaggttgcagtgagccgagatcatgccactgccctccagactgggggacagagcgagactgtctcaaagaaaaaaaaaatgcgtgctcacagaacctgctctatttcacttaatcctcgaagtaaggaggcagtaatccataatcctcgcatggtacttcagaggcaagctggaccctttttatttatcttttttttttttttttttaagtagagacagggttttgctaggttggccaggctggtctcgaactcctgacctcaagcaatctgcccaccttgtctggactcttttaagggggtctctgccctcacgaagttcacaggtgtgtgctggctgaaaaggagcaagacaaaccttctctgggcccatctccttggaatccattaaaagcagctctgtgaaagcagttctatctgctggaggaaggtgtcaaccaacacacataactgagcataacagagtaggaagggtgggaccacaaccctcgcaaatcgtggttaggaaagaagagatcaatcttttttttttttttcttcctttttttgagactctccctgttgcccaggctggagtgcagtggcatgatctcggctaactgcaacctccgcctcctggactcaagcaattctcctgcctcagcctcctgagtagctgggattacaggagtccgccaccgcatccgactaatttttatattttaggtagagatggagtttcaccatgttggccaggctggtcttgaattcctgacctcaagtgattcgcccgcttcggcctcccaaagtgctgggattccaggccgtgagccactgcgcctggcccaggatcactcttttcccattcacagactcagcagggcacagaggctctgagaacttccttcccttctaaaagaagcctcttgacagtgagtggcgggacccccaaccaatgacaatgaactagtgacagttcattctgcgctgggtccttgcgcgatctcccaaccacccactgaagaggcgggtcctgttatgaatgacattagggtgaggaggcaaagggagacagactcaacgacccattcaagaccagacagcccagatttgaacctggcaaaaagggtattcgtgcatccaaagccccgaagaatgagtaaaaagattaagcaacattttggggtccaggggctgcatccttaaccatcaagatatcccgcttcgcaaaacctccaacttcaagagacaacccgtagggtccatttcccatcacgatcaccgcctcccccacccgcctcccccagtcccatccttcagcccttttcccggggcgcccccttgttctctgctggcaaagggcagggttcccgggtcaggtgacccaggttcaaatcacacgattctaagctttctgtgcttccgtttccccacctatggaatgggcagccagtaaaggggctggtgtgggggctgaaccggttctaaagagggcaagggcccgatgcagcgctgggcgccgttatctcctcccgagcgggggccgctccgagttcgggaggaatgaatgaacgactgaaccaatgagcctttgtggacgcggcccgccgtctcccggcctctgcgggcgaggaaatgggggcgccgggcccgggaggccgcagccggccacccaggccaacccggcggggacgcggccgccgccgcagccagagggccgagcctgcgacgccatcacggagcccggggcgggcccccaaggccgagcccgagcttcccaccccgggagccacccaccgacgacgccagggcccgggcctcaccccgagaccaccgcgcgcggagccacccccgccgccgcctcaggctcctcacccgccgccgccgccgcgcgaggcggggacatgcaaatgaaccaacggtctccgcagcgccgcgccgcgcaggcgcaagccgccgccgagtcctggtgcgcaggcgcgggccgccgcggcccggctctcttgcgcaagcgcgctgtccgcttcttctgggcggacgctctggaggcaaaacatttccctgctgggggcggcgaccaccgtgagcgtcccggaaggggcggcaaagacgcctccgtcgcgcacgaggtggcctcgttggctttaccttggttcgcggtcgtccttggttatcgtgagcgtccgcgagtctctgggaggccaagcctaggggcgccacagcgcctgcgcgcgtacggcggccggaaggggctagaggcggctccctgggtgacaaccgcgcgccccacctttccccacgtggccgcgaagaccgggtgagacgctgcggctgccgaggcctgtcccgcgcggagtggggagtgggggtgccgcagggtcgggctggcgcgaccctcgggtacgtggtttggggggaaaaaaaaaatgaaagaattttacagaagccgcctggggacaaaatcctcggcttccctggcattcgctttattttcattcattttatttattcattcagcacctgtgcactgagtgcctgctgcgtgtcgggccccgtcctaggcagtggggacaaggaggctacagggtacaaataaatgagtgaacgatgttgctctagatacaggtaatggtgtgcaaataataacagagtgatgggacgggaaagcagggctgctctttatctagaagtggttttgaaggctgtctcttgagtgctgggaaggatgagaaaggcggggaagaggaacttggaaggcttagatagagaaggtgcggataaggaggctgggttttgttctgagagggttgggaagccactaccgggctttgagcacgtgagtgaggtggagtctaggctctgggagtggcaggtgacgccgcccttaggggaggctggtgtttgaaccagagtgggtgtggctggtagagggacatgtggatggagtcttttagagtccccagcatgtcatggcacacgtttaattttcttttgagacggagtctttctctgtcgcccaggctagagtgtagtggcatgatcttgactcactgcaacctccacctcccgggttcaagggcttcccctgcctcagcctcccgagtagctgggactacaggtgcgcaacaccgcacctggctaaattttgtattttttttttttttgaaacggagtcaaaaggagttcaagcgatctcctgcctcagcctcctgagtagctgggattaccggtgtgcactatcttgcctggcctttttttttttttttgagacggagtctcgttctgtcacccaggctggagtgcagtggcgcaatctcagctcactgcaagctccgtctcctgggttcaggccattctcctgcctcagcctcccgagtagctggaaatacaggcacccgccaccacgcccggctagtttttttgtatttttttagtagagacggggtttcaccgtgttagccaggatggtcttgatctcctgacctcatgatccgcccgcttcggcctcccaaagtgctgggattacaggcgtgagccaccgtgcccggccctggctaattttttgtattttcagtagagacaggattttgctatgttggccaggctgttctcaaactcctgacctcaagtgatctacccgcctcagactcccaaagcgctgggattataggcctgagccaccgcacctggacagcacagttttcttgatgagcagattcctggctgagagaaggaaactggctgccagttaggggccttactcatcttctgttttaccctcagcatgccctgatggataatagggactggtaatgctgcttcccccttttagcctaggctgttctccaggtaattcttacttggccatctccaggcaccatcttatgtgttccaaatctgtactttcctcctccaactcagccctgtaccagatctaggggaccttggaggactcaggtcaggggtggtcacagagccagaccttcccaactcagtcagctcaggggtgggtggaagggaggggttgtgggttggggagtgaagccagagagtgtgggctctctgagtggccaggaaaggcagccacctggaagggctggcagaagctccacagaggactgagaatccgaagtatttgagacaggtgtcaatcagttagaaagcttattttgccaaggttaaggacatgtctgtgacacagcctcaggaggtcctgacaacatgtacccaaggtggttggggcacagcttgcttttatacattttagggagacgtgagatataaatgaatatgtgtaagatggtcacaggtagagacaaatgattgctttcttttgagtctttggtcagcctttcacagaatacacgatttatatggggtacagggcaggtagaggaatagtcatttatgcctcagtccgactcatgaatctgaggttttgtttcttgttttttgttttattttttgagatagagtctcgctctgtcgcccaggctggagtgcaatggcgcaatcttggctcactgcaacctccacctcccgggttcaagcaattctcttgcctcagcctcctgagtagctaggattacaggcgcccactaccacgcccagttaatttttatatttttagtagagacggggtttcgccatgttggtcaggctggtctcgaattcctgacctcaggtgatccaccggtgtcagcctcccaaaatgctgggattacaggcatgagccacggagccaggccaaatctgcatttttacataaacgttagggcagagagagcaactggatatgcatttgtctcaggtgatgactttctgtcctgcacttgtgaagatcacctgtcaatttacattgccagggtgacattcaacaaaattgttttcaggtaaagatcttgagggccacaaggaatttcctggcctggccggggtggtgggagtggagtcccctactccttactccctactgagaaactctttatattactcttccttcacctttaaccttggaaatccatagcagcccttaaagagctcccttttcttctggggcagaaaggagaggggcctatctgcaaaagagtgagatgggactcctgcataaacttgctgaattgcctcttaagcaacaaaggaaaggaacaaatagctaatttattgagcctgtccatatcctgttctgaggaaggtataggagttggctgaatttttcactactgccctatgaagtagattcgtgtttatctctgtttgacacatgagggaattgaagaaaagtgtatctggctgggcgtggtggctcatgcctgtaatcccagcatgatgggaggccgaggcaggtgggtcacctgaggtcaggagttcgagactagcctggccaacatggtgaaaccctgtctctactaaaaatacgaaaattagctgggcgtggtggcgtgggcctgtagtctcagctacttggaggctgaggcacaagaatcgcttgaacccaggaggcagaggttgtggtgagccaagatcgtgccactgcattccaacctgggcgacagagcgagactctgtctcaaaaaaaaaagaaaagggcattgaagtggagggcatgggaactgggttctgcaggctggctgcgagccagtccttctcccgtcaggcagtgtgcagtccatggtgggcatctgcaggaacacagatggaatgtgtatatcccatgccactgcctgaaaagagaagcatgggccagagtgacctgtttctttttcctttttttttttttttgagacaaggtcttactttgtcacccaggctggagttcagggatatgatctcagctcactgcagccttgacctccctgggctcccacctcagcctcccaaatagctgtaactacaggtgcatgctcccacacctggctaattttggtattttttatagagatggagtttcgccacgtgtccaggctggtctcaaactcctggcctcatgtgatccttccgcctcggcctcccaaagtgcaggccaccatgcctggcctgaagtggaaacttgataattccagaacggaaacttgatattactgcaataagcaaggtggatatattgaaacaattaaaatttaaaaagttgttaacctctgttaggctctggacctaaggcctgttcctccttttgttccaaagggacggtggcaaatgttaggttcactcgtaccctgtcaagaccttctggttaagatcatctacagcaggggtccccaattcctgggtcacagacccatactggtccagtggtccctggcctgttaggacctgggctgcacagcaggaggcaagcgtagggtgagcgagtgaagcttcatctgtatttacagcaactccccatcacttgcattatgcctgagctctacctcctgtcagatcagcagcattaaattataggagcacgaaccctactgtgaactgcacatgcaagcgatttaggttgggcactccttatgaaaatctaatgcctgatgatctgtcactatctcccatcacccccagatgggactgtctagttgccagacaacaagctcagggctcccactgatcctacattacagtgaatagtataattattatattacaatgtaacaataatagaaataaagtgcacaataaatgtaatgagcttgaacaatcctgaaaccatccccaccctagccccaccatatccatggaaaaattgtcttccacgaaactggtcccttaggctaaaaaggttgggactgctgagctacaggtttgaaacagaattgcaaagggatttggtgtttttaccaagagttttatcttacttaactctatgtcttgttcccacctgtcagagtggaaggtactgcccaaggttagtgggtcatctaagtgttgatacctacccctggtttccagggtatgcctatactgggttttacttgtttgtttatttatttattttttgagacgaagtcttgctcttgttgcccaggctggagtgcgatggcgtgatcttgtctcactgcaacctccacctccctggttcaagccattctcctgcctcagcctcccgagtagctgggattacaggcgccccactaatttttgtatatttagtagagacggggtttcgccatgttggtcttgaactcctgacctcaggtgatctgcctgccttggcctcccaaagtgctggtattacaggcatgagccaccatgcctggccttacttgcttatttttattttataaggtgggtttgtgtgtatacacacacacacacacacacacacacacattttttttaagagatatggtctcactgtgttgccgcaggctggtctcaaactcctgtgcttgagtgatccccccgccttagcctcccaagttgctgagattacaggcacaagtcattgctcagttctttttgtttttaaacagattagcactttaagaaattgagctataatttacataccataatattcactcatttgatttagtaatttttttttttcttctggagacatggtctccctctgtcatccagaccggagtgcagtggcccagtcacagctcactgcagccttgaactcctgggctcaaatgatcctcctgcttcagcctcccgagtaacttcaaccacacgcaaatgccaccacacctgactatatttttaaatttttttgtagagacggggccttactatgttgtccttgctggtctcaaactccagacttgaaacagtcctcccaccttggcctcctaaagcactgggatcacaggtgtgagccaccatgcctggcctgatgtagtgattttacgttttcacagagttgtacaaccatcatcactataattcaagaacgttttcatcacccagaaggaaaccctatacccattagaagttactccccattccctctcctccagtccctggcaacacccagtctgctttttgtgtctgtggatttgcctgttctggatatttcatgtcattggaatcgtgcaatatgaggcttttcgtgtctggcttctttgacgagacatcatgtttttgaggtctatctccattgtagcatgcttcagcacctcattcctttctctggctgagtaatataccaccatgcgcacagaccattttatccattcatctgttggtagactccgtctccttttctttgttcttgtgatttatttgttgaaaactctgggtgtttgtcctctagttgacattctcttccctagtagggattttgcagatcacatccccatggtgttggttaaggtgtcagagctgtgctgtgcaataccatagtcactcgtcacacatggctatttacattaacaaattaaaatgaaataaaattacacactcagttcctcagccacactgccacacttcagctgtgtgatagccacagaggccaatggcttctgtactaggcagtgcagatagagaacgtttcatcatagcaggaagtgccctgaatgcatgatcagattcgggtttgagattttggcacgatgacttcacaggtgcattttgttcttgttcaggaggtaggtgttgctggtttctcttgatgatgtgagatcaagcagtagactgagttcctgtctaccccttgttgggctcccatcagttttacacctgatggttttggatcctgtgggatcattatctgtttctctcctgtcacagctgatcagctggaatcggaagcagaacttttcctcatcctctttttataacctgggactcatttgtacaagggaggcaggttaagtgctaggttttttttaaaaaaattgttactaattattgtagagacagtgtctcgctacgttggccaggctggtcttgaactcctggattcaagtgatcctcccatctcagcctcctgagtagtagctgggagtacaagagcatgccaccactccctgccaagagctggattcttggccagttttcagaagcctgagctgtatttgttttagtattatgaaagcacagagtttgacttttttttttttttgcaacatcgtctgactgtcagccaggctggagtgcaatggcatgatctcggctcactgcaacctccgcctctgtgctcaagtggttctcctacctcggtctccctgattgctgggattacagacgtgagccaccacacctggcccagattttgattttgatatgtactggatttttttttaatgctcacttgtctcatctgtagctaccaggcatcccttagggtttggaagcttccttgcttcctggtctcacaagaccccagcgttacctgccccatgacctgctgggacttggaatcagccattcctccagaagccctggctccttgtttttaaagattttatgtagagacagggcctccccatgttgtccaggctagtgttgaactcctggcctcaagccatcttcctgcctcagcctcccaaagtgctgggattacaggagtgagccacctagccctggccccagctccttttcgtgggaaatggtagaaaccatacatggtgttagaggtattcagtgctcctgtgctgtcatttctcctaggcatttttagttgctatgactagaaaattagatctttgtttacctaagagaaaacacatgatgggtttatatggatattcccatttcatatataggagttctgagattttttttctcaactttatcgaggtataggatgtacttttttttgagacggaatcttgctctgttgcccaggctggtgtgcagtggtgcaatctcggctcactgcaacctctgcctcctgggttcaaatgattctcctgcctcagcctcccgagtggctgggatcacaggtgcccgccaccatgcccggttaatttttgtatttttagcagagatgggatttcaccatgctggccaggctggtcttaaactcctgacctcaggtcatccacctgcctcggcctcccaaagtgttgggattacaggcatgcgccactgcacccagcgaattgtatttaatatagtgtatatcttatactatatatggtacataaatgatacaaatatattgcatatgtttacattatacaacttgacgattttatatgcatgcagattgtgaaatactcacctcaatcaacagttacctttttcttttttgtggtgagaacacttagaatctaccctcttagcaaatttcaagtataccatacaatattgttaattatagggagttccgagtttttagttgatagtacgatgttagaatcttttttttttctttttgagtcaggggcttgctctgttgcccaggttggagtgcagtggcgcaatcttggcctcccaggctcaagcgatcctgctacctcagcctcctgagtagttgggactacaggcatgtgccaccacactcagctaatttttatttttattttggtagagacagacttttgccatgttgtccaggctggtcttgaactcctgggctcaagcaatcctcctgcctcagcttcccaaagtgttgggattataggcattgacccactgcgcccagccagaatcttttttcttttattctgattcctaataagataatcattattatttgctacatccgtaatagtttcagaataacattactagtatcattatattaaagaaccacctttcttagataaaatgtagtaaactctgtgttctctcctacactttgtttttttttcccaagacagggtctcactctgtggcccaggctggagtgtagtagtgtgatcatggctcactgcagccttgacctcccaggctcaagtgatcctcccacctcggcctctcagagtgccgggattacaggctaagccatcacacccggcctcttctgtatttgcagaagttctagggaagtagggatatcaccctttcctgtgataacaggtgggaagaatttctccagggtggttgtagggctctggtcgctggtagatgcttcctaagtggcgttttcaaggtggccaggccctgccattgcctgctcacccttgaggtagctctctctttgccctaacctctcagctcaggagcatctatcggctgcacgccaacatcaacacaggcgaagatggtctccaagcgcattgcccaggagacctttgatgcagctgtgcgcgagaacatcgaggagtttgcgatggggccagaggaggcagtgaaagaggccgtggagcagtttgaatcgcaaggtagggtggtgtgactgtcacctaccatccttggctcttagatgcaagagcagtgggagagccctgctgccccgccccactgggggtgccacatgcctggcatagaaaccaggtgccattgggccctgtcccctccagcttctgcccgaggcaggctggttatcctgctcccacctctcacctgcttccacctcgcccagatatttgtgggctggatccttctcatgagtctcatttgatcacttccttgaagagactttccctgaccctggcctgggaaacagggcccctgcctccctgccctactctaccctacctcgagcttacagaggcagaagcagcctgtggaaacaggtggcatgttcagaccaggtgcagatgagtgtggttatgaggggctgtttgcaatggtgtgggtggggttaggagaccacccctagcacaactagctccggcagagaccctgactgcagggagcaggagtcctgggcaggggccacatgatgggtgctgggccctggggcagaggcagggggctgggaatgaacaccccacactcccctcctcctgcccccatctcaagttcacttccccattgaacaaacccagggtacagcctgagaggtcagaggtcagcctcctaggcacagagtggggtatagaacactagacaggggccagtgggacaagcaaaagcgtccagcactgtaggggctccctgtgggggtgccagcaggggcaagaatgcagccagagccaggagggatgggagccccaagggagaaggctgtggggtccctccctcccccaccaagcccaccaggcagcatgtggcacctcactgcacagacgtggcctgtgatgacagccttgtgtgacaacggcctcactaccactctgctccctttggcccacggaccagtggcagaaacacccaataccctctacacccccgtgatgatgtggcatgggcgggaatagggaggtgggaggcttctggagtggggtggtcccagcagaagggtcctgaggtgtgattccagcaggcccacggggatgacagctgtcactttctttctgacccctgtgtgcttgcttcccccacccccaacaggggttgatctgagcaacattgtaaagacggcacctaaagtctctgcagacggatcccaggagcccacacatgacatcctgcaggtaggagtgggcatcccacacagcaggtcctgcgtcacctctgtctgggggcacctcttccctgtttcctggatggcagaatacaggctctgaaggtcatgccctccccagcatgcatgggcaagcttgagtttgcagccaggtctccctgagtccatgtccgagggcggcatgccttccaatgcaggggatcccaggctcctgtggtggcatgtatgctgaaatcaggtagatggcttggttgtccctgctgctgggatcccagagtcagggacaccatagaggtgcccctctggcttcccagagacagatggtcaggactcataggacgagagagtgggctcacagtaaggctgtcacttactgagcactgactgtttaccagcactttccagccagtccgttagcactgaagctcaccagtgaagtaggtggtgtcattcctgtcttagtgatggggaaacaggccaggagctggcacttaacctctccagagaccgaaagaaggaaggtaaaagaacttcaatgctttccgtaaggtcgcccatcaaactttgtaatacagcagaaggctccggtgtttgagaaccgactgtgggcctggttctgtgcaggtacttttttcctgtcttcttggtcactgtccaaacaacacctgcaaggctgggatttccccattgtagagatggggacattgagatccaaagagaagagaagtcattgacatgggagcaggaggtgcagtgataggagaggaagttggaagagacggctctgggtgtaaacccggcttgcctaaggcatgacacttacttctccctacctcggggtcctgccctctcctgccttgaggaggtcttgtgaaaattgcctcgttgttgttagtttgctttttgcctttcttgcctaataaggatgaatttattttattatatatatatttatttatctattgagacagagtctcactctgttgcccaggctggtgtgcactggcgtgatctcagctcactgcaacttccacctcccagattcaagtgattctcctgcctcagcctcccgagtaactgggattacagacacacgccaccacacctgactaatttttttgtgtttgtagtagagacgaagtttcactatgttggccaggctggtctcgaactcctgacctcaggttatctgcccgcgttggcctcccaaagtgccgggattacaggcatgggccacagtgcccagcctggatgaatttattttaaaatgagtttgtcttctggctatctttgcattgggtgattcatctttttcctactgatttgtagatgaagtttatataggaaggatctcaataacaatatcgtctatattgtctagcagttactgcttaagtacttcttaagtgctcagcattatgctaaattctttttttttttgagacaagagtctcactctgttgcccaggctggagtacactggcgcagtcttggctcactgcaacctctgcctcttgggttcaagcaattctcctgcctcagcctcacaagtagctgggattacaggtgcacaccaccatgcccagctaatttttttttttttttgagacagagtctcgctctgtcacccaggctggagtgcagtggcgtgatcttggctcactgcaagctctgcctcctgggctcacgccattctcctgcctcagcctcccgagtagctgggactacaggcgcccgccaccatgcctggctaattttttgtatttttagtagagacgaggtttcaccatgttagccaggatggtctccatctcctgacctcgtgatccgtctgcctcggactctcaaagtgctgggattacaggcgtgagccactatgcccggcctattatgctaaattcttaaaatatgttctcttaatctgtgctcagcccatcttgctggtgaggtatctgaggcttcccaaggatcagtgaccacgcccctgcaccccgaaaggtcagctggtgagaggcagagctggtacccggatccaggaagcaaagcactgaaaggccgttctaccagcagtacaggaaactccgtgtttgtttataacattcgctcctttttttttcttaactgttcttttatttattcatttatttattgagacagagtctcgctctgtcgcccaggctggagtgcagtggcgtgatcttggctcactgcaagctccacctcccaggttcatgccattctcctgcctcagcctctggagtagctgagactacaggcgcctgccatgacgcccggctaattttttgtattttttagtagagatggggtttcactgtgttagccaggatgatctcgatctcctgaccttgtgatccgcctgcctcggcctcccaaagtgctgggattacaggtgtgagccaccacgcccagcctatttatttattttttgagatggagtctcactctgttggccaggctggagtgtagtggcccttcctcagctcactgcagcttccttctcccaggttcatgcaattttcctgcctcagcctcccgagtagctgggattacaggcgtgcaccaccacgcccagcggatttttgtatttttagtagagatgggatttcaccacattggacaggctggtcttgaactcctgacctcaagtgatctgcctgcctcggcctcccaaagtgttggggttataggcatgagccactatgcccagcctattttttgttttgtagagatgggatcttgctatattgcccaggatgatcttgaacacctgccctcaagtgaccctcccactttgccctgccaacatgccaggattacaggtgtgagccaacatgctcacctgtttttttttttttttctttttctatttcttttttttttttttttgacacaaactctcactctgtcacccatgctagagtgcaatggcaggatctcggctcattgcaacctccacctcccaggttcaagtgatgctcctgtctcagcctcctgagtagctgggattacaggtacctgccaccatgcctggctaattttaaattttatttttcattaaggaagagtggaaatacattcttagcataaaggattcaagcaatactcaagcatttatagtaaaatctgaaagtccctgccttgtccctcccaccagacactggggtttgcatctcagcggtcagttcgcaactgaaccaacccccttctcaaatgccctgcagcataattgacctttgtgcatcttggcttagatgtgtaaaaaatgcttatctgttgagggagaaaaaaattcaacattgtgatggtcgttgaaattaatctgtttgtgtcataagatttgttgcaaacaggcttgtagaaacagaaggaaaataatgtctggagactgtccagggaaaaactgagccagccaggccacatttatatgtgggaagttgtagaatgaaaggcattagtcacagagactgaatgactccaggagtcaatgggtaaagcccccctccatgagcaaggtggtgagcgccacagaaaattgtcataggtagaacacagctggctctgccacctgcattttagcaaccatctgtcaatgaaaatactctataaaatatttcaagagatttattcggaaccaaatatgagtgaccaaaggcccatgacacagcctcgggagctcctgagaacatgtgtccaaggtggtcgggctacagcttggttttatacgttttagggagacatgagatatcaatcaatacatgtgagacgtacattggtgtggtctggaaaagtagggcagctgaaagccggggcttccaggtcatagacacatttaaagatttttctggccaggtgctgtggctcacgtctgtaatttcagcattttgggaggctgaggtggtcggattgcatcgagctgaggagtttgggaccagcctggccaacatggcaaaacccatctctacaaaaaatacaaaaattaggccacgtgtggtggctcacacctgtaatcccagcactttgggagcccaggcaggtggatcacctgaggtcaggtgttcgagaccagcctggccaacatgatgaaaccccgtctctactaaaaatacaaaaattaaccgggcatggtggcaggtgcctgtaactccagctactcaggaggctgaggtaggagaattgcttgaacccgggaggcagaggttgcagtgagccaagattgcaccattgcactccagccttggtaacaagagcgaaattgcatctcaaaaaaacaaaaaacaaaaaacaaaaattagctgggcatggtagtgggtgcttataatcccagctacttgggaggctaaggcgggagaatcacttgaatccaggaggcggaggttgcagtaagccgagatcatgccactgtactccagcctgggcaacagaatgagactcagaaaaaaaaaaaaaagattttctgattgaaagagttatctaaagacctagaatcaatagaaaggaatattttgcttaagacgggttgtggagatcaagggtttatcaaggaagcctccaggtagcaggcttcagagaaaatagattgtaaatatttcttatcagacttaaaaaggtgccagactcttagttaattctctcctgaatcagggaaaagacctggaaagggaatctctgtagaatgtagcttttccccacaagagatagctttgcagggccatttcaaaatatgtcagagaaatatattttagggtaaaatactttgatttctttccatactgtattagttaggctggaacttggtgtcttattgctacaaaaaagtcttacgatgatcagttatgtctgacttccaaaggcaggaagataaaatgagacatatttgaccgccacttcccatcatgacctgaagtagtttttcaggttacctttggaatacctttggccaagaggaggggtccttagtatggatgaggacttagatttttttttttttttttttttgagacagggtctccccagctagagtgcagtggtgtgatcttagctcactgaaacctctgcttcccgggctcaagcaattcttcagcctcagcctcccatgtagctgactacatggtgtgagccaccaacatctggctaatttttgtattttttttagagacagggttttaccacgttgcccaggctggtcttgaactcctgagctcaaagcgatacacctgccttggcctcccaaagtgaagagattacaggcatgagccaccatgcccggccaagaattttatttttagtttacacatccttgctaacttagtaattccttgtgaaatcttggtagttctaactccaatactgtgcatcctcaaaggcatttctgtcaggagcttttcaagtttcttacagggtttctgctgaagtgctacaccgctgtttgttatgtaaaatgtgcataaaaacatttaccattgtaaccatttttaaatgtagagttcagtgtcattaagtacattcataatgttgtgcaaccatcatgactatccatgacttgcgatactgaaacaaactccatgttcctcttcccctcagcctctagcaaccatcattctaccttctgttgctgcaaatttgactactccaggacctcatataaatggaatcacaggctggccaccctggcttatgcctgtaatcccagcattttgggaggctgaggtgggcagatcactttgaggtcaggagttagagaccagcctggccaacatggtgaaaccctgtctccactaaaaatacaaaaattatccgggcgtggtggcacatgcctgtagtcccagctgctcaggaggctgaagcgggaggattgtttgaacccaggaggtggaggttgcagtgagctgagatggtaccactccactccagcctgggtgacagaggaagactccatctaaaaaaaaaaattttttttaaataaatggaatcacagtatttgtcttttggtgactgtcttatttcacttagcgtaatgtcctcaaggtatatccatagcatactatgtgcctgaatttctttgttgtcattgtagtgtttttttgtttgtttgtttttctttttggagacagagtctctctctgtcgcccaggctggagtgcaatggcacgagctcagctccctgcaacctccaacctcttggctctgatgaatcatgctgctatgaacatgggtgtacaggtatctctttgagactgtgctttcagttctcttgagtgtatccccagaagtggaactgatgggtcacacagtaattctgtttgattttcttttttgagatgaatgctccgtatgttgcccaggcgagtcttgaactcctgggatcaagtgatcctcctgccttggcctcccaaaatgctgggattacaggcatgagccaccacgcctggcttctctgtaggtttgaattgcatttttcctaatgattagtgacattgagcatcttttcatgtattagtggccatttgtatgtattctttgtagtaatgtctattctagtcatgcacactggtgttaacttaatttttgttgttttttgtttttcagttctaatctcattttagcaaaaacttacctttttaaatatcctgttgcattgtaacatatacttaggtccacaaatctgagctcagtgaggattatcccataggcttctttgtttttcgtgtcagtcaatgccaaatcaaagccctttgggctggtggtttctgtagaaccaccctgattcagtctgagggcaaataatctcctacacttcaggctcacagattcatctttggctcatgctaagacatgtcccgaggtcatgtagttgaatggcagctaaacttatctgagttgtttaaagtattttctccccagtggcttagagttgaatttggataaatctgctctctgtacagtgtaaccacatttggcaggtgctcaataaatgtttgtggagtgaatgagagagatgaaaggagacatcaggatgggtatgtctggtgaatgtggctttctccttccttggagagctgaccattgacaggtgtgccagtttgttacagctgtgtgacaaacaacccaaacaacaggcatcttattgtttcttgtgattctgcctggttgggctcaactggatggttcttctgctggtatcgcttggggcctcttgatggcaggtagggctggaatgtttaatatgtctgcatttatgtgtgcagcccttcggcagggacactgagttgtctggatctctctctctctctctgtgtgtgtgtgtgtgtgtgtgtgtgtgtgtgtgtgtgtgtcagtcttccacgctatggcctctgaagctcaaagctcctagaatcacaggtctggaagttgccagagctgtaacttgccccacatcacttccactgcaggcccagatcccaggggagggaaccttgcaggggtccagacactgttgctgtggccatgggttcctcttgcctgagctgatgctgaggtttctcccatgtctcccagatgctcagtgacctccaggagtctgtggccagctctcgcccccaggaggtgtcagcatacctcacccgcttctgcgaccagtgcaaacaggacaaggcctgccgcttcctcgcggcccagaagggggcctaccccatcatcttcactgcctggaagctggccactgcaggtgaccagggccttctgctccagtccctcaatgccctgtcggtgctgactgatggacagccagacctcctggatgcccagggcctgcagctcctagtggccacgctgacccagaatgctgatgaggctgacctgacctgctctgggatccgctgtgtgcgtcacgcttgcctgaaacatgaacagaatcggcaagacctggtgaaagctggcgtgctgcctctgctgactggtgccatcacccatcatggccaccacactgacgtggtcagggaagcctgctgggccctgcgtgtcatgaccttcgatgacgacatccgtgtgccctttggccatgcccacaaccatgccaagatgattgtgcaggagaacaaaggcttgaaggtgctcatcgaagccaccaaaggtaagagctgggggccgacacgagccagcgaacaaagtgggcgggtcagatgtgaccagagtgagggtcagggctcaggactgctttaggcacggcaggctcaaggctccactcgcccctcggcttagacctgcctgcatggcagccctcgtgaagagtctccccatgttttctagtggctccaggagaattccaggccagcactcaggggccaggagcaggccacaatcccatctctggagctgtctggggaaggggcttgctgtgtccaactccaggggctgagagtggggaagggggacctccccagagggaaataagaggactcgggggggctggctggcatgcaccatggcagtctcagctggatgtgtacacgcttgatcatattcagccacaaatccttaggcatattcatgtgtctggctccagggtgaccatggtgagccagccctgggaggtcacagtgctgaccgtcagaccctaaagcttctgtcttaacccctacccccatcccatccactgaacccaccagaaaagtcctgattgacacacagaaggtgttaggaggatgagttcccctttcttgcctgccccgtcactctggttctgtggccaggcctgtgtgggggttctggctctgtctgctgaggagatgggcccacctcagtctcccttccacacctccagcaaggctgaaaatgagtcccgaccttctgcaaagtcaggctgcttttccaggaggtagctcacatctttcctgttttatttataggagctccaatcagttaggtttctgccagagacaggatatgtatatatgaagagactttttggtaaggaatgggatcatgcaattatggcaagtctgtactccatagggcaggctggaaacccccaggcagtccccttttcggggaaacacctcagtttccttctaaggacttcagctgatggaatgagtcccattcacattgttcaaggtcatctcctctacttaaaggcaactgggctgggcatggtggctcatgcctgtaatgtcagcactttgggaggctgaggtagaaggattgtttgggcccaggagttcaagaccagcctgggcaacatgatgaaaccctgtttctactaaaaatacaaaaattgctgggcgtggtggtgggcacctgtaatcccagttacttgagaggctgaggcacaaggatctcttgagcctaggaaggagaaattgtggtgagccaagatcacgccactgcactccagccttggtgacaaagcgagactctgtctcaaaaaaattaataataataataataataatagatagctgattgtggatggtaaccatgtggacagaatacctccacggcaacacctagattggcattgggtggaactgcagagggctacaggtggtcacaggaactgaccgtcgcagccctgtgtaggtgcaggatcttcgccctcttggcgtgagtgccggcacctgcttcctggtgcagcgcctctgggctccatctgcggctcctgtgttcagttttggccacgtcagcccagtccgtatgtgtccctctatggttctggagtttcctgttgcacttagagaagccattcctaccccatgatcataaaaatagtcttcagatgtctttttttttttttgcactattatagttttctttttttaggtgagaccatgagttggtatggaatttatttggggcatgatggaaggaagcgggttggggggcacattcttaagtcttcccagcagccagcagggggcactgcaggcccaggtagcccctggtgttccctggggccttcctggtgcccgtggccactccaataggcagaagggctggactcttccagtggagcaggatctccaccaaaacagagggccctgcggctggttcttcccgcccccaccaccgtctccctttctccctgcagcgttcctggataaccctggcatcctgagcgagctctgtggaaccctgtcccgcctggccattcgcaacgagttctgccaggaggtcgtcgacctcgggggcctgagcattctggtgtccctgctagccgactgcaatgaccaccagatgagggaccagagcggcgttcaggtatgaagtccccctggcccattgcgtgctgtccttctgggtcccagtcaaccggacgagctatagtcagaacaagccagccctgcctgccagtgtcggaaccaaagtgcagtttttcttttcacggacccaagggcaggaaccaaaggtcgggggggaaacaaacccacctgctctcccttattgtccttttgcaccaggaaaaggatggtaggaagcatagggttggggtgtgtcggccaaggctgggatacttgggttagttcccgcacctctgcctcagtttccctagctacagaatagagcagtgtccctactcattactccgtttagcagccgattattgagcccttctccatgtgcccatccacagcagggagccaatcaacaggtgcctccctatccagctgcagctgcaggaaagcccccaggggtgccacggtcctgcgcccccaagcccagctgttgacgtcagccagcctctttctgtgcaagtggccaggagctgaatgggaaccaacttcagcaaatgaagggatacattttgccctgtactcctgggcagttgggggcagggtcctcaggttctccatcgggggatcagcagtcccagtagcacctcatccactgtcctcagtgcagggcagttagcgcctaccctgggtctgtggccgtggacagggggaccctgtgctctgaaggccggcctgagtcacatgcccccgctgcccctgtcggggtaggggatcaagtcacctggatggtaccgtttggacacaggcagcctgagccacaggcatctgccaccccttctcgttagtcacaccctgcagtcacaccatacctgttggtcaaacagcaaaacagccccacattctccctcagagccctctcccacaaccagcggcctggctggaggtgagcgggcctttcccttgtgcaggagctcgtgaagcaagtgctgagcaccctgcgagccatcgcaggcaacgacgacgtgaaagatgctattgtccgtgctggtgggacggagtccatcgtggctgctatgacccagcatctgaccagcccccaggtacccacctcggggggcacacacagtagcagggtggtggctggagtcccagttcagtttctgtatctgcatgaagctctattcccctgcagggccagggcagggctggtgagggtcgtgggcattggctctcaaatgctgacctgcgtatgcatgactttgggtgtcctggagttaccaccagcaccctgcaaagatctgaccaggcctattgcccttgtcacccctaagagctgagctgatatttttgtcaccctgccattattacacaggagttgccagagacccacggaggggaggccgcagggtgttcaccaggggttggtggccatggcaggatgttgtggggggtctatctgctgcatctcagcctttctgtgactggcccctgcaggtgtgtgagcagagctgcgcggccctgtgcttcctggccctgcgtaagcccgacaacagccgcatcatcgtggagggtggcggggctgtggcagcactgcaggccatgaaggcacacccgcagaaggccggcgtgcaggtgggcagggcaggggatgggggcaggcaggctggtgtgggatgtgcaggtaggtgcagagagggcatgggagcaggtgcggtgtgcgggtgggtgatggggcaaaggctcagtccctatccctatccctgtccctgtccctcccacagccgagccccatagggccaacttctttctcatcttgcaaaatgtgctgaattctgccttcatttgcctccttctctgcctttgttttttctgcatttactctccttttttggggagggggtagtttggaggggctttctggtgaaaccctggaaagaaagctataacacgtaatctccttctgtgggttttttttttttttttttgagacagtctcactctgtcgcccaggctggagtgcagtggcgccatctcagctcactgcaacctctgcctcctgggttcaagcgattctcctgtctcagtctcccgagtagctgggatcacaggcatgggccaccacgcccagctaatttttgtatttttagtagagacaaggttttgccatgttagccaggctggtctcgaactcctgacttcaggtgatccacccacctccacctcccaaagtgctgggattacaggtgtgagccaccgcacccttaatctccttttttaaaagtccctatagagagatctggggagaaagaagttggggaagcgtggatggggatctgcctggggtttcagaaaggtttctgccccctccttgggctgctggtctgagttctgagtgtgggacaccctgtccacacctccctggctgaacccagactcctccgtgcagcccccggggccctcctcgcctcctcactcccagcataggattcttggacacaccaggctgggacccacagggggcctttgctctcgctggctcttactctgggacactgacccttacctggtctgaccccttgtccacttctggccaccctggccagcagttccccactctgcatgcgcttcccacctgctgtcctgctggtggtgggagccaccctgggaagcttccaggcagtgccccgcgcccacccacagcaggtgcacagggcacaaatgtccactgaatgggtagggatgtaattgacaggtgcctgtgcacaaccactgtcttcccgtggcctcactgcccccttgccctagggccccttccttggctctgtgccagcctcgggggacctcaggctcaccaactctgaggctgagagttccaaagccataggatagatcctggagcttccctgagcctgtttccttgcctgggagttagccatgccttgtggggctgccaagagggtaaagtagagagatgggtctagcttgatacagtataggcagctgctggatgtcagctgtggttatgatcacctccatcttgttatgatgaagaccctgaggtcagagtggaccccaccccaaagccccatctggcagctcacagctgctctctcctacagaaacaggcttgcatgctgatccgaaacctggtggcccacggccaggccttctcgaagcccatcctggacctgggggctgaggcactcatcatgcaggcccgatctgcccaccgtgactgtgaggacgtggccaaggccgccctgcgggacctgggttgtcatgtcgagctccgagagctgtggacaggccagaggggcaacctggcgccatgaccccaggcccagtctgggccgtgactctgggtgagtcgtgtgactcaggaatgggggtagatccatgtcctccactgtcccccattagttctgtccccttcacaatgagaagtgttttctggcaggccctaggtaaagggtcgggggaggggggagccttgtagggaggcctctacacagaagaaagcagcccccatgtcccagccacttctgggtcccagccagcagcacggatgttactgtcctgctccttcccccagccccacgccctaccagagggggcaaagggcacgtcccatcactcactgccctgtctgaaatgtggcagccactgtgggccaggctcagggcagggcaggcgattccagtggggttgggccccctggcgcctgctgcttactgcagtttcatgcaggcctctgctccttgtctttcttacctgtaaaatgggtctcagatgctccgccctgcttggccccagcttgtctgtctctgggtcctgggccagccaggatacctgataataaaagatcattgggtgaacagcggaggggtctcttccatagcttggctgagcatggggggccacagtcagtggcctcagagtgtgggggagagacagacattttggtggggggggccatggagtcactgaggatagcaaaggggttttgggaacagccagggatctaggatctgctgtcaccctcagacaggcaggcgctgaggccatggtcaggatcactgtttctgacgtgtaccacctgcagggccggagggctccacgttcatcccctactcagctctgcggccttgagcaagtgaaagaacctctccgagcctcaatatgctcctcctaaagtgaggagtggggcagtgatagatcgccctctgagaggtgttggaccaggctgagcacatggagggtgtccagttgtcttaggctgggtgtcctaggtacccaacctcttgtctctgagcctcgatttccccatctataagatagacatcggcgggcacggtggctcatgcctgtaatcccagcactttgggaggctgaggtgggtgggtcacttgaggtcaggagttcgagaccagccttgccaatatggtgaaaccccgtctctactaaaaaaatacaaaaatcagcccagtgtggtgacgtatgcctgtaataccagttacctgggaggctgagacaggagaagtgcttgaacccgggcagcagaggttgcagggagctgagatcacgccactgcactccagcctgggcaacagagcaagactctgtctcaaaaaaaaaaaaaaaagacatcattgttgttgccctcagtgaccaccccaccccaagcattctgggggtgcccagacagctgtggccctgcagaccccagctcttctgctctgaagtcacactcagaggtcacaccgtggtcactaggtggcttgtgcatctcttgtggcctcacgggggtccgggcagcctcatgaccactggtgtgtgccctagccttcctgcccacaccttggaggcctctcccctcttggaccctcgcccctgcttgtcatgtgcctccccgagccccaggatggcctgggctcagtccttgacctcagggacactcctttcccagcaggcccccagcttccgtggaatccagccgatgcaaacagctgaggagcgtcaccctggctgcacctctccgtggtgtccccgtctcccctgcccccagcaggaaagggtgctctcagctcagcagggctggcccaaacctctgacccagtcaccccgccctatccctcctccctggagactcccaggatgtgggagaaagatctcgaatctgccccagactgccctgacttaacttctgggccagtgtgaccttgggcagttctcaagcatttcttcatctgtcatgtggcggggtaggtgctcctgagctatttcgaggacggcctgcagtgctggccctgtcattcctgctccagccttgctctcagtctgcccatggctcccctttgccttctacataaaaccaaacctgtctgtggtcccagcaacttgggctaaggcgggaagatcacttgagcccaggagtcaaggctgcagtgagttaggatggcaccactgcactccagcctgggtgacggatcaagagcttgtctcaaaaacaaacaaacaaacaaaaaaatgcacttcatgccctgcagacccagtatggcccaggccttgcccatttcccagtctttccactgtactcactccctattcccccaccccagggcctttgcacaagcccccatgtgacaagccatgccctctgcctagaagtgcccttcccttggccttccccgtggccggctcctcctagcacatgaggtttcagctcacgttgccttctccaggagagacccccatctcatcacctcatgtgctctggctctgacactgggccccatctgaggtcacctcatttgtgaactctcctgtttgtcttgcccccaccatcggctggctccctgcagggaggcccctgtccccacttgctgtgccttcagcttcccgtcagtgtttttgagtgttcacctgaataaactgacaagcactcgaggtccctgccaggtggccccagcgtcctcccctgggcctgggccaagctgcaggcttcttcaggaaggggtggttctgccttatctgtccctcccaccttagcccaaggaagtgggtgtcttcagtagatgcagctagcatgtttggacagcctcaggttgggtgggggcccctcaccaaagatctcacatttccctggggttatggcctggctttccatcccccctcggccacttcaggcatatcacctcccgtctgtgagcctcggccttctcatctgaactcaggctagatctggcacactggagggccacagcccctagaaaggcgcgcttcaggggatgtccagaacataactccccccagcccccatccccgtcgccttcccttttctgtcacccaggctggagtgcagtggcgccatctcggctcactgcaagctctgcctcccaggttcacaccattctcctgcctcagcctcctgagtagctgggattacaggcgcctgccaccacccccggctaatttttttgtatttttagtagagatggggtttcaccttgttagccaggatggtcttgatctcctgacctcgtgatccgcccgcctcggcctcccaaagtgctaggattacaggcgtgagccaccgcacccggccctggccttctcttaagtagcttttgctgtcctccttgatgacatcgagacctgggctgaggtggagcctgctgcaaggatggtgcgagtgtgttcaggccacgcctctgctactgtaggctcttggtgaagtggcctgacttatctgagccttgggaggtgaatgaggccactctgaccccagccaggcttggttgttgtcactgctgtgttcaggatgtctccctccagccagggatgggcttgggctcctgggaaaggaacacagattttttctgttgtgaacatacatctcccagaggctggactaaacctcattttccagataggaaatagactcatgggcatttgaggggctgcggtgggatgagaccacagcttggcctgcctccaggcccctcatctttttccaaagctgttaacctgaccttgggcaaaaggcctttgggcctcaggtgattaggcctggacgctgtgccagggcctggctcacagatgattcctgggatccccaagaggtagaggagactggagggcgaagaggcagtgtcctgtccagggctggccagccaaagcagaagagccgagatcctgggcaccctagctgggcttacatgagtgcccatggtgggggtgtccattgctattgccaaggtgctttgcctgccattgctggaaggcggtagggaggttggctggcgccagcctgctaaagaacgagcagaagctagagaggcagccccaggctgggccagagcctgacctttgccttagttggctctgtccctggaggcactgtgggaccttccaggagctttgttacctccccctcccagggcctggcaggtgggcactgggagtgggcgctcctcggcgtagatatctccctcttggtgtggcaagccacgcccatagttggtctgtgtccatgaagcgctatttacagagagggaaacaggcccagagaagaacaatatatcatcaccagccttccatgagtgcttactgtggacgaagccattgtaagtgttttgcttccatttcatcaatgctcacatcagccctaggagacagccgggaaactgaagtggggagcttgtgttatttgctgaaggtcctgtggctgttactggccattacttacgttaaaaagagcagggattcaaactcagccctgggtccttccaccaaggaatattctccaccataggctcagttttcttatctgctaagtgggcactgtcacgtccacctggaagtgaggtggggagatggtattggagaaagcccagtggggacctggcacccaattgatgttcaactgacctcagcttccccctcttctctggagggcagaatggaggccagatcctggaagttgccaggaagcaaaccacaggtgggaggtatgggagaggaggtccaggtaggcatatcgtgagaatatcaggagtttgatgatggccttgggctagtgatttcccgtcacatcctccccatttgaaacttgtggatcacacacttagcaggggcttgtgcagccctgaaatgtgagccctttctaaggttggtttcagccttgctccctcccaggattccctggttctgaacttgatctccaccaaccctggccagcacctagaggaaataagagctggtatctggaaacatttgtagccctctccatcctgaagatgaagggtgagtcatagaacagagtggcttcgggggaggtgccgatgacacagccatgcctgggatggcaggtgtctccctaaactgccggcatttttctgcacttcacagaggagctgaggctcacaggccgcacatgacctgctcagggtcaaatgctttcaccagataattaaaatgagagctgagttgtaaattttcccagggaagcaaccccagagaggaaagatcaaggcataggaatcattttcccccctcttttccaaatgaaacagctgaggctcacaagggcttttgcccaaggttgtgtggtgggccagtgattggacaaggattcaaacccaggtctctgaggcccccagtggctcttctctgacacactctttccaaaaagcaggctgctctagattcattctctggtttagcaaccagagaatgctgtgtaaccttgggcaaggagcttgacctctctgtgctctggtttctgtaaaaggagccagtggtctctctgacctcatgggattgtggttaagattcagttaattcaaaaaaagacttggcagggagaaggcccaacagggatgtcactggataccgtggcggggaaagctgggacgcagagaggtcagacactcagaaaaccacgcagcgcgtttcagtaggattccgccccttatttccatgtcttcacaccacctcgagatggagagggcagttcagagtgacctccagcgaatctgccctctccgtgtcgtctgcaggggattagtggggagtaaggggatagagaattatccaggagtccttcagccttgatggtccaagttcacatccgcttctgtgctaggtggccagagggcgggctctacacgagagcctcaggggaccctgcgccaggcgtccgaggccacgtcgggttgccgcgctccgggtcggactgcaccttgaacgctccagccctcccctgggggcgtaccgcccacggccgctgcgactggccgcggggcctgccagtcttcggctttgcggccaatcccggtctccccccaagctacgccctccgttcctctcgcctctgccccaccggtagcgccagtttcttcgtagccccgcccctggcccccagcgattggccgacagttctgcctgttttctgccaagattccaatcctcgcctgcctccaggccctcgcctcccagcgcctagcaccctgagggaccactcaggcaccccaggcctctcccaatagccccacctctgccaatcagcgattggctttaggggctgcccatctgcttcatactcgccaatcactgtcgcttccagcgctgactggccagggagcagccaatcggggcgtggcgtggacccctcccgtggcgcgctctgggggtgcgcgaggcggggccgtggcggctggaggtagcggcggcggcgacgcgtccgggccggtgagggggcgcggggggcgccgggggggcccaagcgtcagcggcccgcgcctgtcgggctgaactgaggtgaggcacgggtcctgtcatggatcccggggcgaggggcggatgaggcggggcatgacagtagcgtcgcgagggcaggaagaggttaaagaccccccccaaccccacactccacgtctactgccccctgggggctactgcatccaggtttgagcccgtcacccgcagtccacgcacgcctgacaccacgtcccttttcgttgacatcccccatacactttagactgtccttgctgacatctcccacacccctggggccttgtccccggcgccccgcacagctgggtctgacatccccctcacacacctgacaccgcgcccccactcacgaacacccgcccccactcacgaacaccccccacatcacctgagtctgtccttgtcgatgacacccccacacccacacctgagcctgtgactcctaactcatggcctcgcaactcacacctggacctagtcccgtcccccactgcctttcctcatatccaggtatctgctcgctactctcgtgcccactcccccagcaacctgtgtctctcttctcagggaccttccccctggcacctgccctctgccctggcagccccacacctctgtctcccccttttctctctcccaccttgggctttcttccacgtgcacctgtgttcgcacaccctctgtaataatccccccgaatcccccaggtcctccaatagtcccccaagccttggtatctcaggatcgctgcaccctcccctccccaaacaaaagcttaccccagtgttcatttctaacagtgcttgacagtctataaagtgatttccggaccttagaataatcccatctgtcagaccaaaccggaatcatctccattttaccagccacagacctaaaccacttgaatgctagaggcagagcctattctaccctgggcatcgctgaccctctgctgtggacccaccgcgtttgggcccatctgttatgtttatctcagagggattggcaggagtcgtgactttgactgggtccggaaaggcttagctggaagggacggcccctctgccaagcgtgtgtctcggagtcctggggcaggctggcggtggagacgctgccggaggaggggggctcatcatcttgggtgcctcctgcaggatgccggagagggggttgccggggccggggctcccagctcttgcagacccgggacccctctccgacactccctgggcccttgaagccgataaagagtaaggaaacactctttagagtgaggcaaactaatgtttcagctgtttaaagctaacctgcaaaacgagcctgggtggtgctaggaatgattcttctggaattttttagttcccttgagtctgatttgcaagcatgcagcatagaaggaggacagtggctttgttgttgaaaagcaataacgtgccatttcctgtaaggctcctggagcgtttcttaccccctcccaccgctccctgcaaagacggtaccagaatgtttcagagggtcatgtcaccttcagcttctcctgtggaaactgaagccatttgggttttctgtccaacttcaataggagtcatttaaaacatatatgggcatgtatgtatatatgtatgtatatgtgtgtgtgttgtacacatatgtacatgtacctataatattcatatgtttatatacatattttatatatacatatttcgtgtgtgttatatatgtacatgtgtataaactttggcaagatcattgagtatatagtttttgggttttttttgagacggagtcttgctctgttgcccaggctggagtgcagtggtgtgatctcggctcacggcaacctctgcctcctgggttcatgcagttctcctacctcagcctcctgagtagctgggattacaggcatgtgccaccacacccagctaatttttgtatttttaatagaaacggggtttcaccatgttggctaggctggtctcgcactcctgaccccaagtgatctgctcgcctcagcctcccaagatgctgggattacaggcgtgagccaccacacccggcctattatatagttaaaaagaaaaaatcaaacagtacaaaaggtcacatagtagaaatcagtcaggtcttccccagcctgtaccccgttcctcctcagatgcacctgctgttgataatttcttatgttttcttccagaggtagtctatgactggggtggcagaaaggggtcgggggaggtatatatcccccaccccttttaaaccactggtaaatttgcattgagcagacatatgcattctaaggccagtcccttactgatggctgtttaagctgcagcccatattttttttttctttctttttttttttttgagttggattcttgctctgtcgcccaggctggagtgcagtggcgcgatctcggctcactgcaagctccgcctcccaagttcaagccattctcctgcctcagcctcctgagtagctgggactacaggcacccaccactacacccggctaattttttcatatttttttagtagagacggggtttcactgtgttagccaggatggtctcgatctcctgaccttgtgatcagcctgcctcggtctcccaaagtgctgggattacaggcgtgagccactgcgcccagccactgcagcccatatttagcttttacaaacagagctgcaatggatagatgcatgcatcagcatgtactaaatacacattgaacgtatttgggctccagccgtgctcagacacttcagacccccctgtcttgctggccatgcctgtagtccacagttactcaggaggctgaggtgggaggattgcttgaaccaaggagttcaaggctgcagtgagctataatcatgccactgcactcctctccagcctggacgacagagctagaccctgtctcaaaaaaaaaaaaaaaaaagggccaagtaaaagggcatattcctcctcctcctctcaactgtgaagttggaaagcctgattcctctcctgtggccagctcagttatcttactatcaagttttgtggtctgtcccatctgataggtaaaaaacagcacaagagatccttttgaacatcacttccatgcttcctacccctgtcttaggtgttctggcttgtggggtagggattaaacattagacttgtttctctgccagtcagactaaagttcaagaaatatttggggctggatgcagtggttcacaccacccaacactttgggtggatgaggcaggtgtattgcttgagcccaggagtttcagaccagctcgggcaacatggtgaaaccctatctctataaaaaaaattttaaaattagccgggcgtggtggcgtgcgtaaatagtctcagctagttgggaggctaaggtggagaactgcttgagcccaggagttcaatgctgcagtgagctatgattgcaccattgcactccagcctgggcaacagagcaagaccctgtttttctgttaaaaaaaattttttttgagttcctgctctgtgaagcttgtccctatagcagggagcagtggtggtgctgagattttggctcaaggtacctcaacaagaacagttgctagaagaaccatttagctgttgctgatttttttttttttcacttgggtctaggaaaagaaagatgagggcatcatgagagattgagacgagtcagatgttaaatctgtctgggaagctgtttcgagactctctccaattgtccaatttctcaccactggtgccagatggagggtgtcgtcatactgaagtcaggcctctgcccacgtgtcatacagttttttttgtctgtctcttctattttggcagttagacattaagaggggattattgagataatcagaatcattcgctcgtttgggttttgcaagacagagcttttaaaagtgcatttgcattttttattttaaacatgaaatacttcttcataaaaagtatattggccgggcacagtggctcacacctgtaatcccagcactttgggaggccgaggcgggcagatcatgaggtcaggagttcaagaccagcatgaccaacatggtgaaaccctgtctctaccaaagaatacaaaaattagccaggcgtagtggcatgcgcctgtaatcctagctactcaggaagctgaggcaggagaattgcttgaacccgggagttggaggttgcagtgagctgagatcacaccatcgcactccagcctgggcgacagagcgagactctgtctcaaaaaaaaaaaaaaaaagtatatcatgtcgggccaggcatggtggctcacgcctttcatcctagcactttgggaggccgaggcaggtggatcacttgatgtcaggagttcaagaccagcctagccaacatggtgaaaccccgtctctactaaaaatacaaaaattagccgggcatgttggtgggcgcctgtattcccagctactctggaggctgaggcagggagaattgcttaaacccgggaggcggaggttgcagcgagccaagatcgtgccactgcactccagcctgggcaacagggcaagactctgtctcaagaaaaaaataaaaacaaaaatagccgggtgtggtggtgcatgcccatagtcccagctactcgggagactgaggcaggagaatcgtttgaaccctggaggcggaggttgcagtgagctgagatggcaccactgcactccagcctgggtgacagagcgacactcagtctcaaataaataaataaataaataaataaataaataaataaattagctggccttgttggcatgtacccatagtcctagctactcaggaggctgaggtgggaggatcacttgagctcagggggttgaggctgcagtgagccatggtttgtgccactgcactccagcctgggtgacagtgaggttctgtctctttaaaaaaaaaaaaaaagtatataacatgtatgtgaaaagaaagaagatttaaccaataataaaattagcacccaactcaggaagtagaacgatgtcccctggaggccccaccctgttcacagagctatttttaaaatatgcttgtcaacatttgttttcttcactgagcaccttttgctactaccatcttgggcagaatgcttggattccaggggctcaacaaagttctctgctggccagattttctgctgagctctctgccagcccagcagcctgtgaggttctggcaggcaaatggctgaggacaagccaccagctgaggggcaggccaacacttggaggcttggcctcagatccctgcatattcgtttcccgtggctgccataataaattaccacaaactggggggcttcagacaacagaaatgtatcctgtcgtagttgtggaggcctaaagtccaaaatgaaggtgtcaacaggactggttccttctggaggctctgagggagtccttcccaggcctttctccgggcaaactttgaagttcttggctcgtggctacatcactccagtctctgcctttgtattaatgtggctttctccctgttgtgtgtgtctttgtgtcctctattttttctttctttttagagatggggtctcactatgttgttcacgctggagtgcagtgatatgatcatagttcactgcaacctctaactctttggcttaagtgattctcccgcttcagcctgctgagtagctgggactataggcgcaggccaccactcctggatctcctcttctttttttttttttttgagacaagctcttgctctgttgcccaggctggactgcagtggtgcgatcttcgctcactgcaacctctgcctcccaggttcaagcgattctcctgcctcagcctcccgagtagttgggattataggcatgcaccaccacatccagctaattttattttttatttttttgagacagagtcttgctctatcgcccaggctggagtgcagtggcatgatctcggctcactgcaagctccacctcccaggttcacaccattctcctgcctcagcttccagagtagctgggactacaggtgcccgccaccacgcccggctaattttctgtatttttttagtagagacagggtttcactgtgttagccaggatggtctcgatctcctgaccttgtgatccgcctgcctcggcctcccaaagtgctgggattacaggtgtgagccaccctgcctggccattttttttttttttttttttagacagagttttgcccttgttgcccaggctggagtacaatggtgtgatctcggctcaccgcaacctccacctcccaggttcaagccattctcctgcctcagcctcccaagtagctaggattacaggtgcgcaccaccgcatccagctaatttttgtattttcagtagagacacggttttgccacgttggccaggctggtcttgaactgacctcaagtgatctgcccaactcggcctcccaaagtgctgggattacagatgtgaaccactcccggccgatcccctcttcttataaggacactagtccttgggtttagggctcaccctaaatctcaaggtgaactcatcttaagatccttaactgattgcatctgcaaagaccctatttccaaagaaggccatgttctgaggttccaggtggacatgaatttgggggatgtcattcaacccttatacttgctgagctagttatttccaacaggacattattaagggaaatgcttgttcaggtacctctgttacttcaggaagaataggccaatggggtcggacacattcctcagcccctccagatggctcatgttggcagctttgcttactcacctgtctccctcggaaggtggaggcatccagatgctctaagccaccaaggacctgactagtgaatgcataccgtctttttttttttttttttttaatacagggtctcactttctcactttgttgctgaggctggagtgggagtgtggtggcaagatcacagctcactgccacctcgaattcctgggctcaagtgatcctcctgcctcagcctcccaagtagctgggactataggcatgcaccaccaagcccggctaacttttaaattttttgtagagacagggtttctccatccttcccagactggtctcaaacccctgggttcaagccatcctcccgcctcatcctcccaaagtgctggaattagaggtgtaagccgccacgcccagctccaagtgtgtacatcttaattttgctttctgggctgtgagcttggtcctgtgattatctcctgttgatacctggtctcagaaggatggggagcatggacacacatcagaccaccaccaagtgattggagttccatattggtcagtcttgaggagaagctggggtgctacggtctgatcttcagggggccagggagattttcaggaaactctgggagatctgaagctaatgaggaattaactacatggcagagccaagggctagcagaaagcaaaattagggctggtgcggtggctcacacctgtaatcccagcactttgggaggccgaggtgggcggagcacctgaggtcaggagtttgagaccagcctggccaacatggtgaaacctatctctgctaaaaatataaaaattagccagccatggtggcaggcacctgtaatctcagctactcaggagactgaagcaggagaatcacttgaacctgggaggcagaggttgcactgagccaagattgcaccactgcactccagcctaggcaacaaagcgagaatccgtctcaaaaaaaaaaacaactaaaaaaataaaaataaagggatgttctttgatgagcagcgggacaaatcatctaagttttgtttcacattgtagggagattaacctgtggggggatgctcagactggcatggggcgacccaggatgaatgagggtcttcaggtggtgagattaggcaagtgggatcttgctgtgttgcccaggctgatctccaattcctgggctcgagctgtcctcccaccccagcctcccaaagtattggaattacaggcgtgagccactgtgcctggcgaatgtgtacatttcaatcatggatcatggggaagccatgtgtcagtgtctcaaaagcatactcaataggccggggccgtgttaaatgggatttgccccagccctgtctgattccttattagggagaacgatacttaccaatacttgtcacccactcgagtggcactatcctgtgaagatggtgacagatgaggaaatcaaggaatggggaggtttattttttactttaaattttttgtttgttttttcagagtctcactgtgttacccaggctggagtgcagtggcctgatcttggctcactgcagtctctgcctcctgggctcaagtgattctcatgcctcagcctcctgagtagctaggattacaggcgcctgccaccacgcctggctaatttttgtatttagccaggcgtggagacagggtttcgccatgttggccaggctggtctcaaactcctgacctcaagtgatctgcccgcctcggcctcccaaaatgctgggattacaggcatgagccacctcactcagccaaaaaattttttttagagacagggtcttgttctgttgcccaggctagagtgcagtggtgtaatcacagcacatgcagcctcgacctcctgggttcaagtgatcttcccacctcaacctcctgagtagctgagactataagtgtgcgccaccatacctggctaatttattttgtagagacagggcctcactctgtcacccaggctggagtgcagtggtgggatcatagctcactgaagccttgaactcctggcctcaagtgatcctcctgcctcggcctcccaaagtgctgggattacaggtgtgacccactgtatgtggcctatgtggaggtttagtgacacatccaaggtgtcacatgctagaccccatcatcccacaacacagtgtgtggtggcagggagcctgtgcatgctgctgtgtggctatgaggaagagaatgattgaagtggtgcattcttgctgctgtgggagggatggctgaagagcaggaggacaggacagcaacaggcaaaagcacctgtctgcagctgttatgtttctgcttccttgctgggcatggacactgagtgtgacatggacccttgccttccagggacccctgccttccagggacccccagcctggttgcagggaagcaagtggagagtggcccctcaagtgcagcagagaaccacagactgctcagtgcagggcagagcagttaactttgggggcagtgaggccaggacatttaggagctttgaaggatgcagagaagtttgccaggatcggagactgcggccaaagcaaaacttggcatgtccagggaattaattcacttgtccagcaaatagttgttgaaggccaatcaaatgcggattgctgtgccaggttccgtgtggtaagaacatggggcttttttttttttttgagttgaagtctttcaccatcacccaggctggagtgcagtggcatgatcttggctcactgcaacctccgtctcctaggttcaagcaattctcctgccccagcctcccgaatagctgggattacaggtatgtaccaccatgctggctaatttttgtatttttagtagagacggggtttaaccatgttggccaggatagtcttgaactcccgaccttaaatgatccatctgccttggcctcccaaactgctgggattaaaggcgtgagccactgtgcccagctaatttttgtatttttgtagagacagggttttaccatgttgcccaggctggtcttgaactcgtggcctcaagtgatctgcccaccttggcctcccaaagtgctgggattacaggcatgagccaccacgcccaaccaaacatagggcttttgaggcgaggacagttactgaagtagaccctcttagtggaggaatgtgagtaccattcagtaccttggattgttttagataacatctaacggcctttggtgacaggtgtgggcagcactgtctgcaaggacagaggacagcaattgatcatagaatttcctggatctttcagggtgtttaacccatagagaccgcaacaagggttgccttaaccaaagattgtctgaaaggcacacaggagcaaatgcagcaggaagaaactccccatttgtgaggcagcctgcggggttggggttaacgggcagcagccattatgtaagatgtgcccggatcccttaggcagagttaatgcttattaactagaaaagaaaacagcctttatcggctggcagataggatgttaattggcttccgtttactgagagattacaggatccatttcacggctgcttataataaactccatccacagagaaactgtccccacccccacccaacatttgtacaaacatttcctgagtcccaaggggtggagctggcagttgtatggtggtccccacaaggtaacagcataaacggtgggcctgtcttatgtctggtcgggaagctatgagacaggctcaagggaatcaggcacatgtgcatatgagtctgtgtgtgtgtgacagtgtgtgtgagagagtgtgtgtgtgcgtgcgtgtatgtgtgtgtgtgtgagtgtatgtgtgagcgagtgtgagtgtgtgtgtatgtgtgagtgtgtatgtattaggatagcctgtgtacatggggcttataggatgcttgggtttgaaattgcctgattcagaacaagaagcagccttgtggctgggcgcagtggttcacacctgtaatcccaacactttgggaggcagaggcaggtcgactgcttgaggccaggagtttgagaccagcctgggcagcgtagcaagaccccgtctctactaaaaataattttaaaattagctgggcatgatagtgtacacccatagtcctagctactcagaggctaaggtggaaagatcacctgagcccaaaagatggaggctgcagtgagctatgattttaccactgcattccagcctgggtgacagagtgagaccctgtctcaaaaaaaaaagaagtagcttgtcctgccctctcccaagcaactgtcaacttgcttggaaccagtgttcccattgctctggaggttctatgctgaggctggtgtgatcatgagttatcgaagatcccatgctccaggttcacgtttcctgaataatgctgcttagtaagtcatttcctatgtcatcctcccataccccgccgagctttgttttttgtttgatgaatggaaagactgcatgaacagaagcagcatgggaaaagatacacgtatgttatttggggctggcccccctctgcctggccgctggtagtcacccttgtggggacacctgaatcccagttcagaaagcactggcatcctaggtactcgcgaaaggtacctagagtgaacgtggcaaggctgggcctcggagccacaggacactgtcatctgtggttgtaaatactatgtggggctgggggagtacgaggtacctaccccagcacagcatacgagtcaggactctggcaggtgcaagtgacagaaacccatcctatgctgactgaactggaaagggtgcttcctgggctccatgacagcaaagtccgtgtgcttttggcaccactggctgccagatccccctagcctgcaggtatcctccttcacctcctggccttgctctgccctctaactctgtgtcaactctgccctgcagtctcacaccctactggcttcccctcccctgaagaaagaggacttctccggcccgatggttccctcaaaagtcccagatcttggtctttgggggcagcaccctgaacctaggggagtgtgaagtctcattacctgaccatggccacctgggtcaccctggagtcaaggggaggatcagccccactttcttctccacagtgacagggagcagagcgagtggtttcccagaatgctgtcctcagaagggatggccactgtgcgtgtggaccaactgtagagcttcagtgcctcctccaggctttcatcactgctaagatcatcaacaggtattctcggccaggtgtagtggctcatgcctgtaatcccagcattttgggaggctgaggcgggtggataccttgaggtcaggagtttgagaccagcctgcccaacatggtgaaaccctatctctactaaaaaaaaaaaatacaaaaattggccagacctggtggtgtgtgtctgtaatcccagctactggggaggctgaggcacaagaatcacttgaacctgggaggtggaggttgcagtgagccgagatcatgccactgcactccagcctgggcagcacagtgagactccatcttaaaaaaacaaaacaaaacaggtgttctccacaggttggaggaaagtgggaaagagcaagctgaacacgtccactcccaaaggccatccattcaagtcccctgggaattacaaatggcttgcctgccccactcccaggtttggcatccattggcctgggagggggtgtggcagaggtgttttgtttgcactgtttaaacattttaaattgagatatagcttacatagaataaagcacataaatcctaagtgtatatatagctcagtgaatttttatgtatatatgcatccttggaaccagatcaagacagttttcaagcccccagctggctccttcctgccccctccctgatataccccctagaggtaaccagtattctaatctttatcaccataaatgtgttttgtacttacgtttcttaaaaattgtggtgggctgtgtgcaatggctcatgtttgtaattccagcactttgggaggcagaggctggaggacagcttgagcccaggagttcaagaccagcctgggcaacatagtaagaccccatctctacaaaaaatttaaaatttagctgcgcatggtggcccacacctgtagccccagctactcaggaggctgaggtaggaggatcatttgagccggggagtcggaggccgcagtgagccatcatagtgccactgcactgcagcctgggtggcagagcgagagaccctgtgtcaaaaataaataaataaaaagtgtggtaaaatacacagtacttaaaagtgccatttttaagtgttcagttcagtggcattaagtacattcacactgttgtgcaaccatcaccaccatccgtctccacaactcttccgtcttgcaaaactgaaactgttcccactaaacagtaattctctgttcccctgctcccagcccctggcacctgccattctactttctgtctctatgaatgtgatgactctagggacctcatataagtggattcgtatggtatttgtccttttgtgactggctcatttcactcagcatgacatccccagggtccatccgtgtggcagcagttatcgacatttggatgtgtataaaacattttgtttactgagcttgactgttatgcagacagaatcattcagtatgcagctgggcacagtggctcacacgtgtaatcccagcgctttgggaggccaagatgggcagatcacctgaggccaggagttcgaaaccagcctggccaacatggcgaaaccccatctttcctaaatacaaaaaattagctgggtgtggtggtgcacacctgtaatcccagctactcgggaggctgaggcacaagaatcacttgaatccgggaggtggaagttgcagtgagctgagatcgtgccattgcactccagcctgggcgacagagtgagactccaactcaaaaaaaaagaatcgttcagtatgcaaccttttgtgcctggcttctgcctcttcactggtgtgtctgtgagatccatccgtgttgttgtcgcgtgtagcagcagtttggtgtgttacatagtgtcccatcgtgggacataccacacacgtgttcccattctcctatgggtggtctttggggttgtgtccatagagtgtgctcatcattgccatgatatgctgctgggcaggtcttcaaagctcccagggctgtatatggggaggctggagggagaggcctctatggcaggtgtggcttgtaggaatcttggctgcactgggcagaagcagaggtctggaggtgggagacccagccggcattgggcggtgggggtactttgtgtctccctacaagcacagcctgcaatggcccacttgcattcagcatgaaggtgcgtatgcctgacacagcctcagcctgtttgtttccctggtcagcctgagctcactccagccttgggttcttccttcttgctgttctccctccctggtgtactccttcccttccagatcccaggacagacccctttcccccaccccatgtccctcctcccacatagactctgtgcatatggtcatccttgtgtgggtcatttgcagtaccgatagagcccgtgaaggtgtgcctccgcagagcatgtacgcagcgagcatgtacgcagcaagcatgcagcaagcacacagagggagtgacatacgaatgtccagcagctaatctaattccaagtaacctagtagggagggaaggatccgtaagaaaagggagacccaaggtcatgaacactgcctgagtcagcccagggtgtacccaggctcccaccaccctgttatcctgccagagcagagaagggcctcccagggctggtgggaacctgggcaggtttttgtatgtgtgtcaaaatgcacataacttgaaagttaccattgtgagctttttttttttgagatgtagtcttgctcttgtcccccaggctggagtgcagtggcgcgctcttggctcattgtgagcgttttaaagtgaacaattcagtggtatatagtacagtcacagtgttgtgcaaccactgccttcatctgatttcagaacttttatttttttatttatttttattttttagacaattttttatttttttatttttaatttttattttttatcttgctgtgtcacccaggctggagtgcaatggcgcaatctcggctcactgcaacctccacctccctggttcaagcgattctcctgcctcaacctcctgagtagctgggattacaggtgcatgccatcatatccagctaatttttgtatttttagtagagacagggtctcaccatgttggccagggtggtcttgaactcatgacttcaagttatctgactgactcagcctcctgaagtgctggaattataggtgtgagccaccacacctggccaatttcagaacattttcatcacccccaaaaggaaatcccatccccatgagcagtcactccccattccacagcccccagcccctagcaaccaccaatctggttcctgtctctatggatttacctgttctgggcatttcatatcaatggaacctcacactatgtggccttttgtgtctggcttctctactcagtatcgtgtttttgaggttcatctatgttgtagcatggatcagtgcttcattccttttcatggctgagtagtagtctgtcatgcgaacattttgtatatccattcatctgttgatgagcagttgggttacttccactttttggctgttgtgaatcttactgctaggagcattcatgtacaagtttcattgttgttgctattgtttctattgtgttggggtctcactatgttgcccaggctggtcttgaactcctagcctcaagcatcctcctgctttagcctcccaaagtgctgggattatgggtgtgagccaccatgaccaaccccatgcacaagttttgtgtggaccctttggttctgtgcctggaagtggaattgctgggccacaatagtatctccctgtgtaacttgtgaaggaacctccaggctgatttccacaatggctgccccatctaacattcccagcatacaaggacaccagtttctccacttgctcgcctggcaggttttagtcagatgcttggcaggatgggtgggagtcaggaggagaacgggtgttccgcatgtgtaggcttgtcagccagcactggggtgggatggtgagaccaactctcagatgaggaggccgaggtcctgggagctggtacacttgcctgagggtgctcatctggtgaagagcagagtgggcttgaatctgtgaccctgccttcaagttcacaatgggaaatgcttcctcagcaggtgactgagggtgaagggtcactgcttgtgccccagcagtgacattttagggataaggacagccccaccccctacccattggatccatgagtaaggagacagaaaaggaaggaggcaaggggaggggctctcacccagaagtacagcgtcctcttccttcatttggaccaggctcagggctcagggttctgctgatgaaataggtccctcccaagccaggcacagtggctcacacctgtaatcccaacactttgggaggttcaggtgggaggatcacttgaggccaggagttcgagactagcctgggcaacatagcaagacctcatctctacaaaaaaattaagaaattaaggctgggcatggtggtggtgcatgcctgtaatcccagcactttgggaggccaaggtgggcagattgcatgagcttagtttgagaccagcctgggcaacatggtgaaaccccgtctctacgaaaaacacaaaaattagctgggcttggtggtacctatctgtggtcccagctacttgggaagctaaggcaggagggtctcttgagcccaggagatcaaagctgcagtgacctgagattgcgctactgcactccagcctgggcaacagagagagaccctataaaatttaaaaaaaaaaaaaaaaaagagggagggagagagggaaattaaccaggcatggtggtacacatgtatagtcccagctattcaggaaactgaggcaggagtttggggaatcccttgagcccaggagtttgaagttacaatgagctgattgtgccactacactcctacctgggtgacagagtgagaccctgaaaaaataaaaaaaagaagaaagaaagaataaagaaaagaaaggagggaggaagggagggaaagagaggaagggaagaaggagaaataccctccccacagacttgtcattggggcacatttctgcaggatgtcccaagtggccccagggtgactttccagcactggacccataaggaaccacagggaccaccactatgaccagcctggcagggggtgatgatgagaggaagtgacaccccaacaacagaacctggaaagaagtgtttccagtgccagttggcccgtctgtttttaaataaacagaagcatgtttcatgttttgtcctcatagcgtccctggcagtgtcatgggacactcaggtggtaccactagttctgacaacctcttctcgcttgggaagccgaggtgggggctgatgggcgtaggtagactacctgtcccttatagtgacaaagaggagaatgccactgagggtgggggtcatgggaactggggcttcctccccgaacccatccaagcctccctgtcccaggaaacgacctcaccacctccaggtctcaggcagaacctggacaggctcctgaggcgcccgccacctccctccactgcagcctaccgtccaggccctacgctgtcacccgagtggtcccgtggtgtcctctggcttccttgcctcactgtcctcttcgctcctttagccgagtgacctctgtccctggagacccattccttctctcactagccccatgggctttgcattttgtggctggaatgtggctctgccatgccttggacactgcccctcagggaggccgacctgatcacctggtcactggtcgcaagtctgggtacacgttgtcatgggagtgattggcctcctgggaccactcccactagggctggcagctctagtgtctggttatttgacgtcagcctgacgtccacctcccgtcactcccctggccactggcccagttggtcctcttcccttgtgacagcctgtgtccacttccttttgccgccataaccaccacaaatgtggaggcgtaaagcaacacatttgtcatctttaggttctggtcatcaggagtctaaaatgggagtgcagggctgggtttcttctggaggctcaggaagagaatctgtgtctttgcctttcccagcttctatcccccagggcctctccctccacctctaaagccagcagcggagggcactcacatctccagttctcctgcgtctatctttgttcgttctggtccttttccttttcctttcctttcctgacagagtcttgctccatcacccaggctggagtgcagtggcacaacctccacctcctgggttcaggcaattcttgtgcctcagccacccaagtagctggggctacaggaatgtgccaccacacccgactaatttttgtattttttgaaagagacagggttttgccatgtcgaccaggctggtctcgatgcctgacctcaattgatccacctgccttggcctcccaaagggctggaattacaagcatgagccactgatcttggccttttttttttgtttttgagacaaggtcttgctgtgtcacccaggctggggttcagtggtgtgatcacacctcgttgcagcctccaactcctgggctcaagccatcctcccatcttggcctcctacaggtatgtgccaccaagcccaactaattttttttttgttgttgttgttgagatggagtctccctctgtcacccaggctagagtgtagtggggcgatctcagctcactgcaacctctgcctcctgggttcaagtgattctcctgcctcagcctccctgagtagctgggactacaggtgcgtgccaccacacccagctaattttttttgtatttttaggagaggtgaggtttcaccatgttggccaggatggtcatgaactcttgacctcaggtgatccacctgcctcagcctcccaaagtgctggtattacaggtgtgagccacccagctaatttttaaaatttttgtacaaaatgagatttcactatgttacccaggctgctctcacctggccctcaagtgatcttcccacctcccaaagtgctgagattacaaggcgtgagccactgcacctggcctctcctgcatccccacatcgggaccctggtgattacattggggccatccagataatccaggacagtctcccccatctcaagacccttaacttcatcacatctaaaaattcccttttgtcatgtaagatcacatattcatggtgtctagggtttaggatgcagacatctttgagtgccattattgagtctaacgcagcccattatggtggtccttaaggttcccctttccagggaagtcaccccaaatgtcaggacaagagggtttcaggatctccagcctcggctctctggcctcctgcccctgccctgcccagcagcgtcattcagcctcttctggggctcctcttacctcaagggcgaaggcctgaattggcaaaccctcagcactcactgcacaggcaccaggccaggccagcacagtgaacgagtgtcgtggagggaagtcacaggagcagtgaggatgcagagcagaggtacagcctgggcaaggggcagagagccccagaaaaagtgaaagggtacctcactcctgcataccccactgccccagcatgcacctcctggcccctgcacacaccatctgacacccaactgcctctaaatgcatctccagggccctgcacacacctgcccacaccccaccaccccagcatgcccctgcaggcacctcctgggccctgcacacacctgcccgcaccccaccaccccagcgtgcccctgcaggcaccttcagggcgctgcacacacctgcccacaccccaccaccccagcatgcccctgcaggcacctccagggccctgcacacacctgactgcaccccaccaccccagtgtgcccctgcaggcacctccagggccctgcacacacctgcccataccccaccaccgcaacatgcctggaccctgtacatacctgcctgcatcccaccaccacagtgtgccccggcaggcacctttggggtgttgcacacaccatctcccacccagcgtccaccacaggccccacctcccctctacatctgcatagtcaggtttggggcccacagatgctctgacataggtatatccagttcagcttctccagccacctgagtctttggggcaacctcttcatcgtagtgaaatctccacccaccttccctccccaaacccgcttctttgtctatggcggtggatgtatagcatcacatccccagagggtaatggagcatttgggtttaatggacagtgcaaagtgaatatccacaaggccacacagataggaatcaatgactgaaaaaataaatgggggaggagagacagccgtccctgtggaataattccaagtcctatccatcgatgctcccctttccgggaggtggagcttaacccatccccatcccatcagactgggctgcttccaaagagtagagtagggaatggggaatacccacttgacagaggcccctggctgaacccaccttacccaagaggtccaggtgcaggtcacctgggggaagttgccctcctatgcccctggaactggctgttcctttaggttaagcaaagtcttgagtaagggcacatgggcagggcaaggtggttcacacccataatcccagctactggggaggtgaggtaaggcaggaggatcacttgagcccaggagttccagatcagcctgggcaacatagcgagaccccatctcaaaaaaaaaaaaaaaaaggtgggggtacatggtcctctagagtgcttgatgaaatgatgttgagactcacctcagtggctgtgggctgcctaggggccaggctccatggagaaggacccggttgtggctttcggatcctgcactggggcctgagttccctctgtccttggacttggccaaacttccctgagtttcatctgcagagtagggaaacagcacctcaccatgaggggtaaagaggaactacggtgcccccagtcattagcggcagtgattgtcaccattgtcttcagcccagctaggccccaccagccagtggctgtggcctcaggcaagcactcagactgcctcagcttccccagctgtgaagctgaactgagactcctcagttaaggctgggaggattccagagcacaggggcaaagggatctctgaacaatagccacattttttcttttttttttttttggagaaggagtctcgttctgtcacccacgctggagtgcagtgccgcgatctcagcccactgcaacctctgcttccgaggttcaagctcttctcctgcctcagcctcccgagtagctgggattacaggtgctcaccacatgcccagctaatttttgtatttttagtagaaatgggctttcgccattttgctcaggctggtcttgaacttcaggtgaggccggccttggcctcccaaagtgttaggattacaggtgtgagccaccacacccggccaatagccactattgtgttgtatgggtgcctgtgtcttcaccccattctcacccccacatgcagaggcagaaacaggccctggaggaaggaaggcctttgcctgagcatggccccagacaccctgaggggaggggagaggggagagaggagaggaggcaagaggagaggaggggagaggggaggggagggggccagccagggtcagggtgcactctgctgagaagggcaatgggttccctgaaaaccagggctgccagcgcccttccctgcccctcaacactgagcccctgggtgtagccacgctggcttagagtcaccctccacagtacgccttgggaccatgtgccgtggaggacctggaccaagaggagtcagatcacccggccagtccttctatagccacagacacccaacgtgtgtttcctggacttggcatgccccagaagctgctggttttctccaggctttctttgttttagcactttatgagagagagtctcgctctgtcacacaggctggagtgcagtggcatgatcactgcaacctctgcctcccaggttcaagcgtttctcctgcctcagcctcctgagtagctaggactacaggtgagcaccaccatacctggctaacttttgtatttttagtagagacagggtttcaccatgttgcccaggctggtctcgaactcctgacctcaggtgatccacctgcctcggcatcccaaagtgctgggattacaggcatgagccactgcacccagtccagagaaattattaagtttcctgtggggagatgctcagaggccacgcaaacaccctatttctcatcctgttttcacccactcattgtagcatctgcccatggttttgttttatttaaggctagtccattttttttgaaataacattttaaaattgtttatatttaacgtatacaacatgttgtgtggttttggggggttttgctttttttgttttgtttcgttttgagacatagtcttgctctctcacccaggctggagtgcagtggtgcgatctcagctcactgtaacctcaacttcttggtttcagatgatcctcctgcctcagcctcctgagtagctgggactacaggtacatgccaccacacctggctaatttttgtattttttgtagagatggggcttttccatgttgcccaggttggacaatgtgatgttctgatatatttactttgatatacatatatagtgaagtgattactgcagtcaaacaaactacaaactaatataaaaatcatcccatatagttaccatgtgtgtgggggggtgcgctgggtggggagggtgaggttaccagtaattgatacaatgttattaactatagtcctcatgctgtccattagatctctagcatacttgccttccgtaactgtaactctgttccatttgacctacaatcttcccatttccccctgctcctggtaactgccattttactctatttctatgtatttgattttttttttctaattccacatataaatgagatcatgcagcatctgtctttctgtgcctggtttattcggttattcatgtatcttctaagttcatctgaattgtcacagatgtcaggatctctttttggtgtgtgtttgtgacagagtctcgctctgtcgcccaggctggagtgcagtggcacgatctcagctcacagcaacctccacctcccaggttcaagcgattctcctgcctcggcctcccgagtagctgggattatagatgcacaccaccacacccagctgatttttgtatttttagtagagacggggtttcaccatgttggccaggctggtcttgaactcctgacctcaaatgatccacccacttcggcctcccaaagtgctgggattacaggtgtgagccaccgtgcccagctgtccccatggttcttgatggcaacaattaatactagcctttgcctaatggtgttttctatttccatcattccatctgcatttattaattgaaattcaactgtaaggaagtgctgtctcttctcccccatttattgagctacttggaaaaacaaagaccatccaaatgagagcagcacaggctgcttattcagagtttgcaagggagtcagccgaagctccagggcaggcaggggagagggagagctgtggagtggaaaagggcaggctcaagtgagcccacaggaggctgttggcctggggaagctgggggcagccagctaacagcaggtgtcctgtggggttgcttagggaagcacaattggctttctctggttggtcctaagttggaaggggggccagtgttagagaagctgcaatcactgaccaggtcctgagcattgctgcagaggttggtggttggtttccggagctggttgctgcacaggttttgggccacagttttgttgccatgtatggattggccattgtcctgcacctcttctgcctcttaccaggagtttctaaggaacggttccagaccccaccccagccctgcatataaatctgatcttcaatttttttttttttttttttttgagacaaagtctcactctgtcacccaggctggagcgtagtggtgtgatcacggctcactgcaagctccgccttccgggttcacaccattctcctgcctcagcctcctgagtagctgggactacaggtgcccgccaccacgcctggctaatttttttgtatttttagtagagacggggtttcaacgtgttagccaggatggactcgatctcctgacctcgtgatctgcctgcgtcggcctcccaaagtgctgggattacaggtgtgagccaccgcgcctggcccgagacggagtttcactctggtcacccaggctgaagtgcaatggcgcaatctcagctcaccgcaacctccgcctcctgggttcaagcaattctcctgcctcagcctcctcagtagctgggattataggcatgtgctaccacacccgactaattttttttttttttgtattttttagtagagacagggtttcaccatgttagccaagatggtcttgatctcctgaccttgtgatccccccgctttggcctctcaaagtgcttggattacaggcatgagccactgcgcccggccttttttttttcgttttcttttgttttttgagacagcgtctctttctgacacccaggatggagtgcagcggcacgatcttggctcactgtaacctctgcctcctgggttcaagcgattcttctgcctcggcctctcaagtagctgggactacaggcatgcaccaccacacctggctaatttttgtatttttagtagaaacagtggtttgccatgttgcccaagctgctcttgaactcctggcctcaagcgatctgccctccttggcccaaagtgctgggattacaggcgtgagccactgcgcctggccagtgatcctcaactttgattcaaatgggcacctgttctttctgtacttcctgaaacaaagcgtggtggcaccctttagagagagctcaacttacactctgaatttgacaaatgtgcagttgaactttaaaacagattccagggctgggcgcggggcctcacgcctataatcccagtactttgggaggctgaggcgggcagatcatgaggtcaggagttcaagaccaacctgaccaacatggtgaaaccccatctctagtaaaagtacaaaaaagttagccaggcatggtggtgcgtgcctgtaatcccagctactcaggaggctgaggcaggagaattgcttgaacccgggaggtggaggttgcagtgagctgagatcgcagcagtgcactccagcctgggtgacagagcaagactccatctcaaaaaaaataataataataataataataaattatatatataaaaatcagattccaggcagccaggtgtggtagctcacacctgtaatcccagcactttgggaggccaaggagggtggatcacctgaggtcaggagattgagaccagcctgcccaacatggtgaaaccccgtctctacagaaaaatgcaaaaattagctgcgcatggcagcacacgcctgtaatcccagctacttatgaggccaaggcaggagaatcacttgaacctgggaggcagaggttacagtgagccgagatcacaccattgcactccagcctgggtgacagagcgagactccgtctcaaaaaacaaaaacaaaaaacacctctaaactctaacaaatgagctgagaagagtaaggcatttcagcaggaatgtctgttccactgggggtccctggagggagagcaggagtctgccttctgagctttccttgggccctttccaaagattgttttcttaggcaaaaattttgacaagtggccaatctagtgtcctgtcccaccttggcctgcagatcctattttatagaaatcatctttgaacttgtgagtgagttacattttgagaaggccaagtttgggttttgaagcaaaaccagcgtgtctgtcccccaaccccccaaatgatgtctaggagctcccgtgtcagtttcaccccttcttgaaagtcacagccaggtgtctgcttgctcattaaggggcagaggtgccaccccaagtggccgccccatgcagaagaggaaaatatctttttctcactcatcttaggttcatggctgaggcccctgtaacaaaagacagattaacaagataaaagcagacaaatttatttaaaacaagttttacgtgtcttgggagccctttataaggaaacaaagacctccccccaaaacaggtaaacctgcatatgtttatgttaggtttgatgaagattagagtcatgggcaaatctgattagaggacaaaaggatctgatctggctgggcaccgtggcacacacctgtaatcccagcattttgggaggctgaggcgggaggatcacttgagttcaagaccagcctgggtgagaccccgtctcaaaacaacaacaacaacaacaacaacaacaaaaagcttctgatttaatgataataaccttgggggaacttagcaaggcctgtttgttcaggttcttcttggcatctttgcatcttctgttcccctcctccaggtacaggggaggcacctcccacctgagggtctcatgacctgcttctggggagaagggaaaagaaacagtgcttcctgcttctgtgttctcaaaggccaaggtcatattttaggctattatgtcccgaaccccatcccttgttctcactgtggtccccggggtccgggatgtcacatggcttttccctttgccttcctgagctgcagcaaacacggctcactcctgaacacagggagcatctttctgctgtgacaaaagacaaaagcgtgactcttgggcccgtttctgctgaaatcctcagggacctcctcccccagttctgcggtctgtcctacccagttctagaattcacttcatgggtgtcttttctaatttaaattcatgtaaaggtagtttgggctgggcgcggtggctcacgcctgtaatcccagcactttaggaggccaacgagggcagatcacctgaggtaaggagtttgagaccagcctggccaacatggtgaaaccctgtctctactaaaaatacaaaaacttagccgggcatggtggtgcgcgcctataatcccagctaatcgggaggttgaggcaggagaatcgcttgaacccgagaggtggaggttgcagtgagccaagattgcaccactgcactccagcctgggcaacaagcatgaaactctgtctcaaaagtaaaataaaataaataaaaataaataaagggtagtttgtatcactaattaaaaataaattcaatatttctgcaaaataggaggtgatggggaaaaaacaaattaagtacagtggaaacagaagaatgttatggccgggtgcggtggctcccacctggaatcccagcgctttgggaggctgaggcaggaggaccacttgagcccaggagttcaagaccagcctgggcaacataaggagaccctgtctctacagaaaattaaaaacttagccaggtctggtggcatgagcctataatcccagctattcaggaggctgaggtgggaggatcacttgagaccaggaggtcgaggctatagtgagctatgattatgccactgcacccaagcctgggcaacagagcaagaccctgactataaaacagcagcaacaacaaaaagaatgtcatgaaaacctgtgtctctgatggttgcaggcattggtgccctggggccctcttcctcttgagacagggagggtggcgggtgctggtggtgctgggactccctccttggcctcaccaagggatgaggcagctggaacagaagcaggccgctcttgtgctgtgggatcatgcactggctgtggtggcccaccgtgctccaggcctcatcctcaaccctccccactgtgtctgtgtctcctactctgtctcttacaaggacaccagtcattgcacttagggcccaccctaaccctcatctagagatcttgccttaatcacatctgcacagaccctttttcctaaaagcgtcacattcacaggttctgggggcagggtgtatctttcaggggccatcgttccaccccctccagttacgtcccccagccccagctgccctcagtgctctgtcacctgcagggcctagcacacttgtgtagttccagccaggttgtgcagtgactttgtctatgtctgtgggtgccactcgaggctgagccctggccctgggcaggtgatccagtgaaggatggtaccatgggcactgcaggcagccctgtctggtggctcttcttgttcacagaggctgggcaggtgcagccaagggagggtctgaggccacaatgcccttctggggagactgttcctcacaggactgtgacctcctgaggagctcagagcaagagcccacaggagggtgggagggacccccttcggccaggacccaggcctcgggcacctcacccactgttggggtatagcaaatggctgaatcctttctggggaaggtgactttgcagaacatgtccaggccacctgacccagcacctcgattctaggaatcaaggagtagagaggctgcgccgttctcacccaagcgcccaagtgcaaggacagcccccagggtctgtagcggcaggggtggtgctgggcagtagtcagacatggctgattgttgtggggggcggagtgaaacagacgcagtgcatcccatgggctgatgatgaaagatgccgacccccagcaaccggctgggaaaggtctttaggacctggtttctgtctgtttgcaagcagtttagtttatttttattttttgagacccagtcttgctctgtcacctgcgctggagtgtactgctgaaatcacggctcattgaagcctcaacctctttggctcaggtgaccttctcacctcagcctctcgagtacctgggaccacaggtgcatgccatcatatccaactaatttttttctctagagacggggtctcactatgttgcccaggcttgtctcaaactcctgggctcaagcgatcctcctacctcagcctctcaaagtgctgggattccaggtgcgtgccaccacgcccagctgagagcagttttagatttacagaaaaattgcaaaggctgtaccaagttccccgacaccgcacacatctagcgtcccttacgcataacctctcacagtgctgtgctgcatttgcctcactaatgaacaagtgctgagatggtattaatattaatggagctccacactttattcacgttcttccatttttcctgaatgtcctttctctgtccaaggatcccacctgatctttagtcctcacatctccttagactcctctgggctgagacggtttctcaggctctttgtttttggtgaccgttacagttttggggagcagtggtcagggctgctggagaatgcccctccggtgggatgtgtctggtgttttttcctttctttcgagacagagtctcgctgtgtcacccaggctggaatgcagtggcgtgatctcggctcactgcaccctccacctcctgggttcaagtgattcttctgactcagcctcctgagtagctgagattacaggtgcctgccaccatgcctggccaatttttgtatttttagtagagacaggattttgccaggttggccaggctggtcttaaactcctgagctcgtgatctgcccgcctcagcctcccaaagtgctgggattacaggcgtgagccactgcgcccagcctgatgtttttctcacggtcagatggggtgatggatctgggggaggaagaccctagtcgtcacactccatcagaggcacatgcgtccacctgacttatcccagccagcgttgtcctggatcacctagcccagctgggatccatcaggtttctgtgctgcagtcactgacagccccctttccagactgcactctttggaaagaagccgctaagcgcagccacacctgagggcaggaggcatggcccctcttggaggtccgagctgctgtgctatttgggaatcctttgcctgggagatttgtctcttccctaccatgtacttacttactctgtcatttctttatattatatggactcatggttattttatagttcaggctttcatccatgatgctttatgtttttttccatttctactcaaactgttccagctttggccatcaagggttctttcggtgggtgcccatgaccccctcgccacacccatctgctttggtttctgtttctgaacatgccctccatgactggcacctccacgtacgtgctctaggctcttcctttctctctggccccatctttgaagcaggtgtttctcccagagccagtgcccatgggtccatgttcactaggagagtcagcagtggaggctggtgtagcagaatcccaagtgcactttgtacagcgtcactcaccggcactgatgcctgctctggggcctctgcaccctttgcttcactttgcagtaatgcgttttcatttactggatgattttaaagcgtgggaactaaccaggcacggtggccatgcctggaatcccagcattttgggaggctgaggccagaggatcgcttgagcccaggagttccagaccagcctgggcaacatagtgagtcactgtctctacaaaatataaaatgaaaaataaaaattagccaacccagtcggacgcggtggctcatgcttgtaatcccagcactttgggaggccacgttaggaggatcacacgaggccaggaattcaaaaccagcctggccaacatggcaaaaccctagctctactaaaaataaaaaaataaaaaatagctgggtttggtagtaaacgtctgtaatcccaggtacttgagaggctgaggcacaagaattacttgaacctggaaggcggaggctgcagtgaaccgagatcatgccactgcattccagcctgggctacagagggagattctgtcaaagcaaaaacaaaaacaaaaaaaaacacccttagctgaccaagtgggaggatcacttgggctcaggaatttgaggctgcagtgagctatgattgttctactgcacttgagcctgggtgggggaaaaaaaaaaggccaggtgcggtggctcatgcctgtaatcccagcactttgggaggctaaggcaggcagatcacctgaggtcaggagttcgagactagcctggccaacatggtgaaaccccatctctactaaaaataaaaaattagctgggtgtggtagcaggcgcctgtagtcccagctacttgggaggctgaagcacaagaattgcttaaacctaggaggtggaggttgcagtgagccaagatcgtgccactgcactccagcctgggtgacagagtgagactccgtctcaaaaaaataaataaataaaaaataaagtattttggtggacagagaccctcgggtccgagctgacacaagcccactggacgtttggcctgacagtggtattggcaccgagcacctcggtgcccactggatgtttggcctgacagtggtgttggcactgagcacctcggccacgctggccccacaacccgctggtagctgtgtgaccttggctggctgcttaacttctctgagcctgtttgctccctgggcaccagatttggaaaaagaacagactgtttgtgaggattacattccagtaccaacaagaaaggcttttgtaaatgattaagcagtacacacaggaccgtggctgcggaatgcagttgagggcatccctccccacgcagggagccagaaactgggataggaaaaggctggtggaacacccaccatctctcaggatctcgccgtatcttaccacctccccttacccccccaggaccgagtctcctgccattccgagcaggcctggtatgggtaatggtgtgaaggaaggcccggtgcgattgcatgaggatgctgaggctgtcctgtcctcgtccgtctcatcaaaggcaagtaccccggcctcctgggatgggtgttctcctggggccccagcctccccaccccccctcccaggctccctgcctcctcctcccagcctctgcaccccctccaaacaggctcagggattcctctgctgtgctccatgcagcccatcacaaatcaccctgtacctaggatgtgcatgttggtaccccttcctacctgggctgagggtggagtggtggagcctctctgctcccacggccccaaatactccatcatgggatggaggacgccagccaccctctattccaccaaaagccccacttgtgatgtgaatccaaccagcccagccacctggtaagaggccaaaacctaacccagttccagcgtggggtgggaagcctgaggtatcagacatgtcttggagcccccttttctccctcagattttggaacactaaggaattagccaaggccaggcatggtggctcatgcctataatcccagcactttgggatgctgaggtgggaggatcatatgagaccaggagtttgagaccagcctgggcaacatggtgaaaccccgtctctactaaaaatataaaaattagccaggcgtggtggtgcacacctgtaatcccagctacttgggaggctgaggcagttgaatcgcttgaacctggaaggcagaggttgcagtgagccaagattgtgccactgcaccccagcctgagcgacagggtgaaaccctgtctcaaaaacaaaaaaaaagagccaaatgcagagagccaaagggggtgggcatgcttggtctttactctgcatttccaagttcacctcttaagtccacaattccactgaagaaaagatattctctcaaagcaattgggtcagccctgttgttcaccatagaaaccagaacccccactggcccctaagtcctctcagctgaacctgaaacacagaccgacccagccccacgcagaaatcatcgcactcccagggcctgactcaggccgaccgcacaggcagttttcaaagtccatggggtcaaaggctgaggtggcgtcatcttccaggcctcccgacctttccccggattccaggtgacatctcagagcagcaggcgggcgggaggactcattcaccggggtcaccaccaggtgactgaggcacagggcaggcacgtgccttgaagtttagtgaaggtcccaacagagctggaagaacacctggatatggctgttgctctgcatgccggagaggagggggtctgcaacgtggatcccaccacgtggacaagcttgaggcagcggtggctgctgaaccacacgcagaaatgcgccagtgctggtcacttgccgggcatcacacacacatgcccattctcctctgtactggcaggccccaacaacattgctcttggtccgcctggccagccccaaggtgggagggactcactctgcaatgtctcttttctttggttaagaagctgagccttggctgggatggtggctcacacctgtaatccctgcactctgggaggcccaggtgggaggattgcttgaggtcaggagttcgagaccagcctggccaacatggtgaaaccccatctctactaaaaatacaaaaatcggccaggcgtggtggcacgcacctgtaatcccagctccgcatgaggttgaagtgggagaatcgcttgaactcaggaggtggaggtggcagtgagctgagatcacgccactgcactccagcctaggcgacagagtgagaccctgtctcagaaaaaaaaaaaaaatactgagcttcttcccactgtgtttatggccaacatgcatcccatctgggattgcccactttctcttgtcagctgcctggccgacaaatccttctttcgtaggatctccccacgtgatggatcttgaaacttcaacccctcagtgatgcctgctcccagctctttggataataaggtgtttgtgttcattagagaggagctggaagtatcagccagaggcagcagcctccactgagcatgtgaactggccccaacacacgtcctccaggtgccactggtggctacctggagaggtgcagtttatggacgtgtgttcctgatactaagatttggcattggccaggcatggtgactcacaccagagatcccagcactttagcaggccaagacgggaggattgcttgaacccaggagtttgagaacagcctgggtaacatagcaagaccttgtctttgcaaaaaaataaaattagctgggtgtggtggcacacatctgtggtctcagctactgaggaggctgaggtgggaggatcacctgagcccaagaggtcatggctgcagtgagctatgatcatgcacttgcactccagcctggtggcagagtgggatcctatctcagaaaaacaacacagagttggctttgtaacgttaagagccttggctgggcccgctggctctcgcctgtaatcccaacactttgggatgccgagacaggcggatcacctgagcctcaggggttcgagaccagcctgggcaacgtggagaaaccccatctctgctaaaaatacaaaaattagccaggcagggtggcgcgcagctgtaatcccaggtactgggaaggctgaggcaggacaaacaaccacttgaacccaggaggcagaggttgcagtgagccaaaattgcgccaccgcactccagcctggtggacagagcaagactgtctcaaaaaacaaacaaaacgacaaactgataggaggtaaccaccgaatggaggaggtggaagaactctgtctccagcagggtgcagggaggcactctccatggaatattccatttgcacacagaggcccattccagaggggagcagctggtccgactgattcagagaagaaactggcctgaagctggtaaggccttggactgctgctgggaccaccaacaagcgcccgcaattctcaaagctcatggaaccagacgtctgcaacctggctgcatgtcccagaaaaggcagaggtccccaaagacagcttccgagaagctaggagaagatcaaactccatggcgaagtttggcctcagaaacaaaatcgctgtgcaatctgtccctttgaggaagggagggctgggctggtggaggggaccctgggagcactgaggaaaaggaggctgtgttctgtggaaccagactgggggtgcaaggctgctgggtagcccaggacatgtgggagagggtctgagagctggcaccttgctgttgtaaagataggactgggagaccaaagagggcaccctctgcctgagctcagtcgggcagagctgggattcaggccaagtgtgtggacagactcaggcccagccctttaccccgagccacacactgagctgagcaaactccagaggtgggggcaaccatgctcagtctgactccggttgcctgttacacctgagtagtgcgccacatcccttccccatctccagcctccaccatatctatcctgggtttctgcaggagccgcttctaccctggtcacatttttatttttattttttattttttcagacactctgtcaccctgtctggagaatagtggtgcaatcacggctcactgcaaccttggtatcctgggttcaagcgattcttctgcctcagttttctgagtaactaggattacaggcacccaccaccatgcccggctaattttcgtatttttagtagagatggggtttcaccatgttgggcacgctggtctcgaactcctgacctcacgtgatctgcccgcctcggcctcccaaagtgctgagattataggcatgagacacagtgcccagccccactctggtcatattaaaaatagcccatttcggccgggcgcggtgtctcatgcttgtaatcccagcacttcagaaggccgaggcaggcagatcacttgaggccaggaattcgagaccagcctggccaacatggcgaaacctcatttctactaaaaatacaaaaattagccaggcgtggtggtgcttgcctgtaattccagctactcaggaggctgagggaggagaatcgcttgaacccgagaggcaaagtttgcagtgagctgagatcacaccactgtgttccagcctgggcgacagagcaagactgtgcctcagaaaaaaaataaaaataacccatttatttgggcaaagatcagcctccttgccaggctttgtaggatctagcacccacctctctttgccatctcctttctcttctctgggccccctccctttccctgtgccagcaaatctgccctccttgtggtcccccagggtcccctgctccttttcaccctagcctctgagtattcattcctccccacctaatactatgacacacaccccaaagtgacctgcacctcatccttcaagctcagcctctcacctaccaacccagagttcttacagaaccctgggccacctcctcgcggcaccttcccaatgggtggctgtatttgctttcatctgatgcttctgttggcatctggctctctgtgtggaccagtggcaccacggggacaggaagggtcttgtacacacccccaccctgcactgtggggctccaggcccttcaggatgcccttgcctggtgggacttcgcagattcctgggagtcactgaacaacctgcccttccacgttacattcagacagcaaagcattgcaggctgaggcagaagaatgctctcccctgcttctcaatgagtcccatggccgagtccactggggaaatggaatcagagcacctcccatccagaactttccagaatgctctctgccacttctcagtgagagtcccgtggccgagtcagcaggggaaatggaaactccaacctgatgggcaggtggtgcctgtgggatcccacagggctcggacacactgctgtgcggcgtgaccttccagggaaggagggagggctgtgggggagcaggggacttgggcagctccagaggactgcagaaagcgatggctctcaggctggcatgggagcagtcaacgcaggttggcagccatcatcagtgtcactgtcaccccctcaactgggctggatgaagagtcatagatgcctacctctggagtcctgatcggaagttgtgggaagggacacgctgacacagagtcagggtctgcttgcctgatacccactgccaaccccctgaccccaacggtccctggtgcctgttttcagtccctgtgtacctacaatgccacagtgccgtagtcaggtgcacacaggctgtggagggaactgaagtttgcacgtgggccagtcctattgtgagcctgtctctgagaatgtgaaacctgcacacctcacctccaaagtggatggtacctgtcatcttgggaggttttcactgtgtccccagtaggctctgtggcctgtggacccaccacagatcacccagaaccaagcaaggccaacatactcagggtggggtacatccctcggccccggcccagagggtgtaaggaaggcacttctggggcaaggtcctctgcggagccgcccccctgccctctgacctctgatcacatgttctgttgcagcgtgaccacaggcaagtgctcagctccctgctgtctggggccctggctggtgcccttgccaaaacagcggtagctcccctggaccgaaccaaaatcatcttccaaggtaagtgttggccatccccaggtgctagagaagctgccaggcggtcacctcctccttcatggcccccaaaccacgcttcaaattggcttttatttttagatttattttagaaataaggttttttgttgttttttttttttgagacggagtctcgctctgtcacccaggctggagtgcggtggtgcaatcttggctcaccgcaagctctgcctcccgggttcacgccattctcctgcctcagcctcccgagtagctggtactacaggcatgcgccaccatgcccggccaatttttttgtatttttagtagagacagggtttcactatgttagacaggatggtcttgatctcctgacctcgtaatccgcccgcctcggcctcccaaagtgctgggattacagacttgagccaccgcccccggccagaaatgaggtttttctctgttgcccaggctggcttcaaagtcctgggctcaagtgatcctcctgcctaagcctcccaagtagctgggactatgggtgtgctccactgcactcaattgggtttttttaatgcctctttaaaatccactcagaggccctggcgcagtggctcttgcctgtaatcccagcattttgggaggccaaggcaggcagatcacttgaggtcaggagtttgagagcagcctagccaacatggtgaaaccccgcctctactaaaaatacaaaaattagctggacatggtggcgggcacctgcaatcccagctactctggaggctgagtcaggagaatcgcttgaacctgggaggcggaggttgcagtcagccaaggtcgcgccatcgcactccagcctgggtgacagagagactctgtctcaaaaataaataaataaataaataaataaataaataaataataaaatccacttcgaatctgtacgagtttcctggggctgctgtcagaaagcaccacaaaccaggtggcctcaaacaacaggaatttcttctttcacagtcctagggccagaagtctgaagtgaaggtgtgggcagggctgcgttccctccagaggctctaggggaggatccttccttgcttcttccggcttctgggggctcctggttctccttggcttgtggccgcatggctccaatttctgcctctgtcatcacgtggccttctcccctgtgtgtctgttttctctctctctcttttatttatttatttttgtttgtttgtttgtttttgagatagagcctagctctgtcacccaggctggagttcagtggtgtgatcttggctcagtgcaacctccatctccccagttcaagcaattttcctgccttagcctcccgagtagctgggacaacaggcacgcaccaccacgcctggctaatttttttgtatttttagtagagacaggtttcgacacgttggccccgctggtcttgaattcctagcctcaagtgatccacccgccttggcctcccaaagtgctgggattatgggcatgagtcaccgcgcccggcctgttttctcttcttataaggacaccaattcgcatttagggcccaccctaacccagtatgaccttaccttaactctattacatctgcaaaggccctgctttcagataaggtcaccttcttggagactaggggttagaactcagacatagcttttcagaggacagaaattaaaccctcaacagaaaccctcgccctccctcgctagggttagtcacagggtcctctgaagaggtggcctttgcccccttcaaacagttaccagttcctgcctagggcccagaagcaagatggttacggcccgggccctctgcccctcagctgtttgggaagaatctgcaggcttgagccaggcccttcccaccaccttgagccgatcccctaccctctctgtgtcccagtttcctcctccgtaaagtggaggcatggatatccgcttcctccttggctggcatgggcatccagtgagctggcaggccttcgaaagggacagccttatttatttatttatttatttatttatttatttatttagagacagagtctctctctgtccccctggctggagtgcagtggtgcgatctcggctcaccacaacctccacctcctggatttaagcgatactcctgccttaccctcccgagtagctgggattgcaggagtctgccaccatgcctggctaatttttttgtacttttttttagtagagtcagcgtttcaccatgttggccaggctggtctcgaactcctgacctcaggtgatccacccgcctcagcctcccagagtgctgggattacaggtttgagccactgcacctggccagggcaggcccctttaagtgcgcatgagcaggtgcagggtgttgtgttctgcagggaactggggttcaacccttgaggcagcaggcatgcatgcatgttgcacacacaagtggtgggtggtgaggggtgagggaggcgggctgccagaccacgtcagaggctcctggtgaccgtttgtggcctgtttttctgggtctctcccaagagtgcttatggcccaccatggctcgggtcccccatgcccaagggcagcacagagccagaaagggaacctggcagccacagggggtgggagaggcaggatagcggtgcctgtgctgggaccctgggaggggcatgtccgggagagagggcagaccccacatgtagacccctgcaggccttgttctgagagagccagggcttctcagctgagacccaagtgcctggaggctgggacaccttccctgcaggggtttgggtgaatggtagtctagtccaggggcagggtgctgagtgtcaacccatctcagacacgttctcctctcaatggagaccctcactattctggggcttgggtgtcagctcagctcccattcctgggacaagattggggggaaaaggagggtgactctgctagtgggtgccaggggtggggccacgcagatgggaggttctgtcctttgcatctcagtggcttttgtgcttttgttttttccagtgtcttcaaaaagattttctgccaaggtgagccactatgtcaccgccccggcctggggacagtcaccactaccctgatgggctggcaggagttaggcaggtggtctgaggagagtctcaggggtggggacaggactacctgtcttcccattcccagctctgcctggacacagcccagcctgggaactgacgggacatcccgagtgtccttccggcagtggggtggggagactcaacagctctaaaacaaccttttcatgtttgatttattgttaaacagagagcaggtgctactttcttaataaaggaaaagataaactgtaaaagctgggatgccaaacaccaacagacatgcccttgggcagggctccgagctgctttgcagcctggttcgctttgcagtccccaagagaacttggtggggtgggaggcccagaaaacatagggaggaaggacggggctggggttgataatgtcagtctggacaaatcggggtggggccctcacatgggggtggggttatgtgctgtgcatggagatggggtcaccccggccccgcctccgcactttgggcgctctgctggtcacagaggcccgcagggagggcaggcagaggcagagggatgttgaccttcccgcttatctccaggaggccttccgggtcctctactacacctacctcaacgagggatttctcagcttgtggcgcgggaactcggccaccatggtgcgcgtggtgccctacgccgccatccagttcagcgcacacgaggagtacaagcgcatcctgggcagctactatggcttccgtggagagtgaggccccgccccgccctgccacagaatcgccccgcccacgcccgcccctctctctttcttctgcacgccccgctccctcctcttcgtgccttgcccctagccctgccttccctcttcccacaacgaaacactgggagactcctcacccaggccctcctgagggaccccctgactctgtcacatgccctattctgtcttcagagctcctctcctttgcccgtttgtctccagacgtttctccacccccacgcataaatcccagaggggcaggttactatgcccccagggccgtagggaaaatacgcatcattaatttatgccagcaggggggaagggaaggcagccatgtaaacctcaaaatgaggcccactccagagaccccatcagcttggccaggaggaagccaaacccgcctcgtgttcctcggtccccacccctgtccccgccccagcagagacgtgcgggtgctccaggctgggcctctgtgcatctgcaaccccctcactgccgtctcgccttctcctcctgccctgttcagagccctgcccccttggcctcgcctcttcgccggcgcactggctggaacgacagccgcttcactgacctaccccctggacctggtcagagcgcggatggccgtaaccccgaaggaaatgtgagtccttacatcggtgatgcgcatcagccccgggggctctgtgtctcgggggctcccaggtcggaatccctctctctatcgggccccaggggtttgcatctgggcctccgtgtccacagggcaggcctgatgtgtcattctgcagctgttccagaaaggcagcaatttgttctcttagcctgggggtcactttctgcttagatcaaaccaagggtcttcattttgaactgggcacagatgcagtaaaaatatgtaagaatacggccgggcacggtggctcacgcctgtaatcccaacactttgggaggccgaggtgggcggatcacttgaggtcaggagtttgagaccagcttgggcaacatggtgaaaccccgtatttactaaaaatacaaaaattagccgggcgtggtgacacgcacctgtactcccagctacctgggaggctgaggcaggagaattgcttgaacccgggaggcggaggttgcagcgagccgagatcgagccactgcactccagtgtgggcaatagagccagactctgtctctcaaaaaaaaaaaaaaaaaaaaaaaaaaagtctgagactagaatgcttaattcaaggaagataccatgatcatgaaaaatgtgtaagaatagaccgggcttgggcccaggtgcggtggcccatgcctgtaatcccagcactttgggaggccaaggcaggaggatcgcttgagcccaggagtttgagaccagcctgggcaacatagcaagaccccatctctacaaaaactgaaatattagcctgatgtgatggcatacgcctgtgatcccagctgctccagaagctgagggaggaggattgcttgagtctcgcagcttgaggctgcagtgagccatgatcacgtcactgcactccagccggtccacagagtgagaccctgtctccaaaaaaaaaaaaacaaaaaaagtgtaagaatagaggccgagcatggtggctcacgcctgtaattccagcactttgagaggctggggtgggtggatcacctgaggtcaggagttcaagaccagcctggtcaacatggcaaactctatttctactaaaaataaaaaattagccaggtctgctggcatgtatctgtaatcccagctacttgggaggctgaagcaggagaatcacttgtacccaggaggcagaggttgcagtgagccaagactgtgacactacactccagcctgggcaacagagggagactgtctcaaaacaaaaacaaagaaacaaaaaaaaagacaagggctgagcacttgcttcccgtggcgaaggtggagtctgggcttacgcatgcatttcccctctaataacaaagcttgagtgatggggttatatgtcttgaagaagaaggaaaacatcaacatccagacacacccaggcccagccggcttcgggaggagccgagagcctctgtggctcctccctgtgcctgggaggcctgagtcccacctgctgggctgctctgtcctggcaggtacagcaacatctttcatgtcttcatccgcatctcgagagaagaggggctgaagactctctaccatggatttatgcccaccgtgctgggggtcattccctacgctggcctgagcttcttcacctatgagacgctcaagagcttgcacagaggtaaggagagctgggagcatgaggaggggacgttcaggaagcattccctggggacagcagctccacctgggtcacatagacctggagaccaggcggagtggggtacgacccctgggtggggcaggctgtagacccacatccaaatcgggagaaaacacactgtgtgcagccgccactgaggaacctggactcactgccttaaatgcctaagtgagaggaactctggctggtgccacggctcgtgcctgtaatcccagtgctttgggaggccgaggtgggcggatcacttgaggtcaggagttgcagaccagcctgggcaacatggcgaaaccccgtctctaccaaagatacaaaaaaattaggcatggtggcacacacctgtggtcccagctactagagaggctgcggtgggaggatcacccaagcctgggaggtcaaggccgcagtgagctgtgatctcactgctgcacaccagcctgggtgtcaaagtgagaccctgtctcaagaaaaaaaaaaaaagtgactctgggaagcccagtgtgtcacctagagcattgatacctcacctcttcacgagcacacacgcaaagcatatgggtaaaacccagatggaaaggaagtactcttgcttgttttggtagttgggagaaaatcaaaaagtacaaagaatgatataatactcatacctgccactgcatgtgaacaggcattcacattttgctacatttgctcccagatattttgttttttttcttttttgtagagatggggtctccctctgttgcccaagttggtctcaaactcctgggctcaagcgatcctcctgccttggcctcccaaagtgctgggattaaaggtgtgagccgctgcactcagcccactcccagacattttttgtcaaagaaataaaatgttaggggtaacgctgagggcccaagtctctctcctgaggcctcttattagaagtgagggttgcacccctcaagactgctttgaaaatacttctgtatgtatttatctgtggcatgaacaaaaccatgtcacctttcacaggtataaaaaatgctccaagtggagtcagctcacccgggagtgcagctcccagctcagctggtttggggtgcatccaccagcatctgtgctctgttccgcctttttagtggctgcacagtgggccttaccttcttggggtgccctttggctgttgccaggttttctgtgatcagccgacatccaggagctcgtctccttgtgtgactgtaaaaccccattttcggtgtttctctctggagtgctttccagccccttgaccccacgttctcaccccacgtgatgccatcagaccccttgtttttgcccacctggtgagcagatcacagtgtctcctgtctggctgtttttttgagacggagtctcactctgccgcccaggctggagtgcagtggaacgatctcagctcactgcaacctccacttcctgggttcaagccattctcctgcctcagcctccctagtagctgggattacaggcgcccaccaccacacctggctaatttttgtgtgtttttggtagagacagggtttctccatgttggccaggctggtctccaattcctgggctcaagtgatccgcctgccttggcctcccaaagtgctgagattacaggcgtgagtcactgcacccagccttggctgttttaaattcctagttctaaatttactattacaaatgtttaaagtacccctactgacctgttgctgctccttcctcctccacacccacacaccccgtttagacccgcaagacagagcagggtgaagttcatggtcacttatgtccactctgtgcaacagctcgcaggggctccccagggagggcgcaggtcggggaccaggcacgggagcacctagaatgttcctttactagacgtggagtagagctgattagatgtgagcagtggctctaggagttggttctatgattctctgtgtttctgccttttaagaaattttatttctcggccgggctcggtggctcatgtctgtaatcccagcactttgggaggccgaggcaggcagatcgcctgaggtcaggagtttgagaccagcctgaccaacatggagaaaccctgtctctactaaaaatacaacattagccaggcgtggtggtgcatgcctgtattcccagctactttggaggctgagacagaattgcttgaacccgggaggcggagggtgcagtgagccgagattgggccattgccctccagcctgggcaacaagagtgaaattacatctccaaaaaaaaaattttttttatttctcgagtttgagtgaaaggagcgacccggaggtgaggcagtggggcgtgtgggtgcgcatgagtgcgaacacacgtgggggtgcaagtgcatgtgtgtatgtgcacgcaggttgctcctaggggtgcaaaggcgcgcgcacgggtgcggggtgcgcgccccctcgcggcgccttcacggccctcccgcccctcgccctgcagagtacagcggccgccggcagccctaccccttcgagcgcatgatcttcggcgcctgcgctggcctcatcgggcagtcggcctcgtacccgctggatgtggtgcggcggcgcatgcagacggccggcgtcacgggctacccgcgcgcctccatcgcccgcacgctgcgcaccatcgtgcgggaggagggcgccgtgcgcggcctctacaaaggcttgagcatgaactgggtcaagggtcccatcgccgtgggcatcagcttcaccaccttcgacctcatgcagatcctgctgcggcacctgcagagctaggggaccctgagctgctctcaggacggtggaccggtgacccctttgtattctgggcccatggaacggtgggggggtgcgcttgattctacttcaggaggcacatggggcgctttatggaacgagcaggtgggcctgaggggcctgggctcagagtccacgtccaaacgcaaagctggcagccctggaagtgcagtgttggggcgatggtgtggggggtcccgcagctcccctcttccttcctctgcagacgctggcgctgtctgccggaggtgttgcccaaaaggccctagtggggcgtggtcagctccacctcctgatcctgtgtgtcctccgacatgctgctgattctagtgacccctgtccccaccaggctcagagccagaccgcgcctggaccttcttgttctgactccacgtgcctgcccggcctccagggtgcgggggcgcctttcttgcaggcggaccctgcccaggatggggccagcctcgtgctcagctttggccacaaatgcagcccctggcccaccccaccctgccggccctgccttctccagtatttcccacatggccacgactcctcagtcactagagcctcctgctgggaacagtgtcccccagagcctcatgtctatcctagaccctgcaagcagctgggtccccaagagtgcatctccccctagagttgcctgcccatgcccacctgctttgtaaccttcccaggagattcatgcttgctctgcacagcagggctcgaggcccaggccatgacacggaactgcctcaggtttgggtcagacctgcatcctggggcatctgctgaaatgtgagcacacaaaccacctcctttggcccagaagccccccaggcctagcatctcagtgccccaaccctctgcccagctgtggtatccagcaggtccttgggtccccacttgagcaggcacttggctgggatatggagcaatttaaagcccacaggggttgttcagtttctatgaaatggagcatggggtgcctgctagcctcaatcccccgaagtgggagcctcatgatagagtatagcttgggggtgggaggtgaggaaaatctgaggtacccaggggaacccccagctaactggtctctcagaggagtcccccagggcccgccagctatcacagggactcagaaacacccatttcctaatgacatggtgagtttcttgatttcttttttttgtttgttttgttttggttttcaacttggctgaccccgggtctatgatctattcacatcgaacccctgactggtctgcctggtgccagggtgagcgtgaccgtgagtgttgctttcgacagctggctcagcacacgctgtgtgaagggatctgagcttgttcatctccagtcgtgacttcatttcccttccttctgtcctcctcctgttcttgccttggacctgcaggtgtgcagaccgctctctctgccttccttgcatgtggccaccagccatccctgatcttgtccccagaggcccaggcagcctgtgatggctgtgaggggctgtcccactgtgtgggtatcccttacccagcacttaaacttggcaggagaggcagggcaaccctcacagggagatgggagggcacccaactcccacaagcatgcaacagcagtaggaattgggggtctgccccaggtgggtgagaccaaatgagtggatttggggccacaggctaggcaggagagacaaggggtaggtgggagggtcccccagtccctgctgaccccagtgtgtctccccggagatggctcctagctgagtgggacccggcaggagttggggacagtgctgtcccccacccctgcacacagccaggccctcaggctctgcggtcactcgcctccctgctggtcactggtcttggtctggagttatattttgatgccatgaagacactgtttatatctaatgtttatatattttaaagatttgtgccaagagagtatatttaataaaaacttaaatgacttcttctcctgctcctggctcttctttggctctgaccgcccccccatcttcccccatgaacccccaaacagggttgaagtgcttttgacacatttgtgataaaagttctgaataaaagtcttgaataaagaagtttttaaatgcaattgttgtttgaattaatacataccacaattttccagaaaacaccagctgtccacaagggtttacagtgaaaagtaggtgaacagttccctctgcagggggcctcctgtgaccattttctcttgtctcctcccacagagattctgtgcatacactcatccctttcaggatatatgtggccacccacaaaggcaggaggggccgtctctgtgcagccagcacagcccaaagtctcatgggcttgaacatggccttccttcccaagagccctgcactctggggctggctgaggcttcaggcctgaacgtcagtcaccatctgcaggggcagccaccagagggtctccagtggcaatcctggctcacttcacctgcagcccattggccagagcaacttggaggacccacccactgccaggccagaagtgggagcctctgcgtgcccagagaggaggggcggctgggccagcacaggcctggtgctcttgttggggtgggagtaggaataagttccactgcgctgaccccccactgctctccaatctgctcacgtgcaacaggatttcttttgagttggtctccgttgtgcacattgttcagcagctgtgcggttttctcctagaggatccccaggatgacatttaccagggtgggtgtggtggctcatgcctgtaatcccagcactttggagactgaggcaggtggcttgcttgagcccaggagtttgagaccagcctaggcaacacagtaagaccccccatctctacaaaaaaatagaaaaattaggccggatgcagtggctcacgcctttaatcccatcactttgggaggccagggcaggtggatcacttgaggtcaggagttcaagaccagcctggccaacatgctgaaacccccatctctattaaaagtacaaaaatcctagctactcaggaggctgaggcaggagaattgcttgaacctgggaggcggaggttgcagtgagccgctgcactccagcctgagtgactgagaagtctccgtctcaaaaaaaaatttttttttaattagccagtcttggaggtgcgtgcctgtagtcccagccactcagaaattcacgcctcccttatgttaccaaaccaggctcgttctgcccagcagtatgccaacagagatgacaggttttgcagcaaagagtttattcacgaggcagccgagtgaggagacaggagaacagatctcaaatccgcctccctgaagatgggattttaggaatatttaagggatagaggagcaaggtggtcagagacgtggggaaaagtggggcagtcggggaaccgtgcgtgcgtagtcaagcttcatggcttttccataggatgtgtgttcacaaaatgacattgttatcatgatctgagggtggagtgtttggccctctaacgtcaaaggtcaccacctaaatatacacaggccaaggtgaaggttcggctctcagcccatttggattggacaagaactgatcctgttcctgaagaacaacttgagcaaccattaccatggtggcccatacatagagatattatctataaggaaactagtgggagtttttttgtttgggtttttttgttttgttttgtttctttgtttttgagacggagtgttgctctttttgcccaggctggagtgcaatggcatgatctcggcttactgcaacctccacctcccgggttcaagcgattctcctgcctcagcctcctaagtagctgggactacaagcgcccgccaccacacccggctaattttttgtatttttagcagagacggggtttaaccatgttggccaggctggtctcaaactcctgacctcaggtgattcactcgccttagcctcccaaagtgctgggattacaggcttgagccaccgtgcccagcctatttttctgtctttcttttcttttttttttttttttttttgagacagggtctcactctattgcccaggctggagtgcagtgacactaccatggctcactgcagcctccaactcctgggctcaagccatcctcccacctcagcccccctaggagctgggactacaggtacatgccaccacgcctggctactttttgtattttttgtagagatggggtctcaccatatttctcaggctggtctctaactcctggctcaagtgatctgcctgtcttggcctcccaaagtgctgggatgacaggcgtgagccaccacacctggcctgggagtttagctatacattgtttagctgagtgacttttaacactatggggtttataatcaactaaaaacaagtgaggtaagttaagattggtaggtctaatcaggtgagccctcagttccccttatggatgggcaattgttaggtattgccatgacaatgtgatagcaatttggtgggggctgctgaactcatctgcaccccgcctctgacatccagcccagatttctgatctaagttccacgtttcacaccagcccctgaaccttggtcaacccctcccctctcccacccaccactgtggcatctcctaacagtatagaggtgagcccgtggacctgtctagactagtgacagtgaagaagatgtttgctagctgcgtccaagaagagcttcaggagtccttttttttttgagacggagtcttgctctgttgcccaggctggagtgcagtggcgcgatctcggctcactgcaagctccacctccaggttcaagtgattctcctgcctcagcctcacaagtagctgggattacagatgcccgccaccacgcccagctaatttttatatttttagtagagacggggtttcaccatgttggccaggctggtcttgaactcccgacctcagatgatctgaacgcttcggcctcccaaagtgctgggattacagatgtgagccaccacacctggccaccaaatgctttttgctataaacaattccgcgcagcctaggagtgtcctgaagaaacacaacatggtaccccaggtgcaaccggcggctgatgactgaaggtaggtgtgtaagtagcttaacccatgcccggacgtgggatcatcctgagataattgctctaccctgccccgctaaggcccacagcaggactgagcctggttgcccacagtgtcacctgctcattggtgccccctgcagggcatcttccctcctcgtctcagctctcacccgccatgggggctgcctggggacacctcccaggtaaaccactagctctgagtccttttggggtcatctttgggggaaacctatccaaaaaggaataggaatgccaggtattcctgcaaatagatcatatagatttataccacatactcacccatatttgatcttccataatctgacaagtaaaaaatggtatctcagccgggtgcggtggctcatgcctttaatctcagcactttgggaggccgaggcagctggatcacttgagctcacgagttcaagaccagcctgtgcagcatggtgaaaccttgtctctacaaaaaataccgggcatggtggcacgtgcctgtaatccccactactcaggaggctgaggtgggaggatggcttgagtctgggaggtggaggttgcagtgagtcgagatggcaccactgcatcccagcatgggtgatagaaccagaccctgtcgcaaaacaacaacaacaacaacaaaaaccagttaatttatggccaggcatggtggctcacacctgtaatcccagttctttggaaagctgaggcaggaggatcacttgagacctggagtttgtctctataaataatttttttttttggtgggacagggttctcattctgtcacccaggctagggtacagtggcacaatcacatctcaccgcagcctcaacctcccagggtcaagtgattctcccacctcagcctcccgagtagctgcgactacaggcgtgggccactatgcctggctaattttttatattttgtagagacggggtcttgctatgtcacccgagctgatgaactcctgggctcaagagatctgcccacctccacttctcaaactgctgggattacaggcgtgagccactgcacccagccctctacaaataattttaaaaactattttactattttaaaagttgaaggttatattttgttttatctatgagttttatttcccctttttattttgtttcggcttgtctggaaatggtatattccgtttcttcacccatagggcttcacaacatcagcactgctgacatttggcgctgataatcctctggggtgaggccatcctgggcaccacacggtgttgagcagcatctctggcctccattcttcagacaccaagagcaacacctccaccccttgtggtgacaactaaaagatgtctccagacatcaacatgtgttcctttggagcagaaccaccccgtcctgtgagaggcacggatatggtggttacaatggatacatcaacaagaatttaaatgtttggccgggcgcggtgggcgcggtggctcaggcctgtaatcccagcacgttgggaggccgaggcaggtgaatcacttgaagccaggagttccagaccagcctggccaacatggtgaaacccatctctattaaaaatacacacacactgccgggtgcggtggctcacgcctgtaatcccagcacgttgggaggccaaggagggcggatcacgaggtcaggagatcgagaccatcctggctaacacggtgaaaccccgtctctactaaaaatacaaaaaattagccgggcgtagtggcgggcgcctgtagtcccagctactcgggaggctgaggcaggagaatggcgtgcacccgggaggcggagcttacagtgagccgagatcgcgccactgcacttcagcctgggcgacagagcgagactccatctcaaaaaaaaaaaaaaaaaaaaaactacacacacacacaaaaattaaaatatttatcttccctctgagccacacacaaagacctcaaccacccccttctatctttcctatttttatttatttatttattttgagacagagtctcgctctgtcacccacgctggagtgcaatggcgcgatcttggctcactgcaacctctgcctctggggttcaagcgattctcctgcctcagcctcctgagtggctgggattacaggcacctgccaccgcacctggctgatttttgtatttttagtagggatggggtttcaccatgttggccagggtggtctcaaactcttgacctcgtgatccaccgcctcggcctcccaaagtgctgggattacagatgtgagccaccatacccagcctgatgaaaattttaaaaaagaaaattcttaaaccgttctaagtcagggaactgtctgtatacatcttacttatacaaaaaggttacatatgcaccttacattgtttttgtttttgttttgagatggagtctcactctgtcacccagactggagtgcaatggcatgatcttggctcactgcaacctctgcctcccgggttcaagcgattctcctgtctcagcctcccgagaggctgggattacaagtgtgcaccaccacgcttggctaattttttttgtattttagtagagacagggtttcaccatgttggccaggctggtcttgaactgctgacctcaggtgattggcctgcctcggtctcccaaagtgttgggttacaggcatgagccacggcacccagcctgcaccttacattgtaacacacgtgtggacacaccctggagtcacagctacaggacaatttcagagtccatgacggccccacatcccttccctgggtcaccaaggcctcaatatgcccctcccccctccctgtgtgtgatatctatacaagtcacctgcatacctgtagcagacgctggcatcactgtgggctccccgccctcccattcctcaaactggttttcctctaaggtttccctgcccatctaaccttctcctggcactccctcatggtgcatttctctcacctgcccgtccgtcccaggccacctgccctctcagctgggactccaacttcccctgatttctggtctcttccatcctgcttttggacttttcctgggacacttgcatttcttctttttctttttttttttttttgagacagagtttcactctgtcacccaggctggagtgtgatgcgatctcggctcactgcagcctccacctctcaggttcaagcgactcttctggctcatccttctcagtagctggaactacatgcatgcgccaccatgcctaatttttgttattttagtaaagactgggtttcaccatgcgttgaccaggctggtctcaaactgctggcctcaagtgatctgcccgccttggcttcccaaagtgctgggatttgggattacgggcgtgagccgccgagcctggcctccttcttgctctcctttctcctcccagacctttgctcccctctcagtcctgctcctctctccctcccgcgcagcccccaccctgcacccgggcaggtgccacagggacgtgcaagacagctaccaccctgcacaagcccgagtcccaaaccactcagaccctgtttgtaaaaatcggcatgctcctttatttgttcagaagagcagccagcatcacccttgccactcaaacctggcacatacgcttcggagacaatggcctcgggaccctcatgctgctgggcccaggagagacagttctgaggcagaaactcggcgtccaaggggggccgcgggtcaggcactgtggtgaagggaacgccggggagtccggccccaccttgcagctggggacacgggggcgcaaacagagggggcaggctagtgtcccgctgccccaggaacagacctcagggccccaggagggtctgcaggcagctaggagcctgccaagtgctggtggaagtagaggccgaaaaggctggcgagcagctggcaggcagccgtccaccagatgaggtaggccaggacgccacggaggaagaggggagtaagcaggccacccagagccccggcaatccgcgctgcagtctgctggacttcgtcctccccagagccgatgggggcagcgctggctgaggatgggtcgggggatagtagaggagctgggcccaggccccaggaatagcctcctaggagaagaggatgaagcgaggtatgagtggaaaaatgggggagggggcgagggacagggctggcacggggggccaggcccattcctccagacactcccacccctgtctcagactccatctccagcccagtctccaccccctcaggcgctgccccctgtccaaggcaaaccctaccccaggccccacctcctgctcagatcctgcctcaatacatgccctgccccctccccaggccccgcctcctgccaagacgcaacccctccccaggctccacctcctaaggcaaacgccatcccaaactccacctcctgctcagaccctgcctcaccacagtccccgccccctacccaggccccgcctcctgctcagattgcacccatccccaggctccacttcctgtccaaggcaagccccactccaggctccgcttcctgctcagaccctgccttaccacagtctccgccccctgcctaggccccgcctctccccccccaccgcggtccccgccagagtccacctccactctgttttatcttccaactccgcccctcctccacccccacaccgcggcatctcacccagcgtcttgagcagaagtgtgcagttgagggtgaggatgagcggcgtcaggtactgcaagctcaccacggtcacatagcagtagactcggaccacctgtgggcaggtagcaggggtggctgcagcaggaggccttctggtttgggacgactccacgcccaaaggaccaggaaccccaccctgagccccaggttccctctggcctaggtcatcggggcgtccataccctctgctggatttcacgggcttcgatgcggccagcctcccttcgcagctgctccacccgggccttggccaggcacaggtaggcctgcaggtggggccgggtcaccgccagccgcagcaggcacagcaccaccagcaaccagaggcgcccagagtcgaaggcagaatcggacagcctgtgcggagagggccgggggcaagggactaagaaggtcgcccccgaccccccaggatcttccccaggctcctccctgaatctcagaggctagggcacccaggggagccccagctacctcctagccccacccaatacgcacagggagaaacgcgtctccccaaacggcggctggtgcaggaagtcccgtgcaatgggctttgtccagagccacaggatgaacaggggagacaggaagctggtgtgcaggaggaacctggggggtgagggcaggagggagtgaggcctgggtaccccctctcctcgagtctctcccttaagctccctagtccccccacccaccaagcgacccacttaactgcagcatgggtctgtcctccgacatggtcagtgcgtcccggtgggtctgggccagccgcaggcctgggaaggtgaggaaggcacccagcacagagcccaccactgccagtcccacgcggatagccagcttggccacaggaagcctaggagaacaccaggtcacgagcctgcctgggggaccctgggagggtcccagcctgcccttgcctccctcccccattcccaggactcacgcccagtcccagccctgcttcttcagaagtggctctaagttctgggtcatgctggccagacctggggacgataagaagaggaccgagtagagtgaattcctagggtctctaaggccactctgttccctaaccccccatccctcaggcatccgtttgcttcccaagtaggaatgaacaagggtctgccaggccctgagccaggcacaaggacaattttgtgctctagttacacagtactttttacaagaaacaagattggagtggtggttcacgcctgtaatcccagcactttgggaggctgaggcaggcggatcatctgagatcaggagtttcagaccagcctggccaatgcagtgaaacccccgtctctactaaaaatacaaaaattagccaggtgtggtggcaggtgcctgtaatcccagctacttgagaggctgaggcaggagaatcgcttgaacatggggagcggaggttgcagtgagctgagaccgcaccattgcactccagccttggggacaagagtgaaactcagtctcaaagaaaacgaaacagaatgcaccaggcagacactcctgattgggctgggaacattcaggggtatctgttgagcctgagctccctaggttatagaaggaatctagagggggatgaaggactcctgcaggagaaaaccaaagtcctcctggaggaaggaatcctcaattcaggacccaagatttttcaaaaattaagagcagggctgggtgcagtggcttgcacctgtaagtctcagcactttgggaggccaaggcgggtggatcgtttgagctcacaagtttgagaccagcctgggcaacatggcaaaacccccatctctacaaaaaatacaaaaccaggggtggtggtgcacgcctatagtcccagctactgtgaaggctgaggtgggaaggatgggttgagcccaggatgtggaagttgcagtgagctgagatcatgccactgcactccagcacagagcaagaccttgtcaaaaaaaaaaaaaaaaaggagcaaattcatatgagctcacaggcaaaatcaccaaatgcataaggaaacaaatcaccataaaggagagttaacagaaaaacaacagtcaagtttaggcctcaaagacttcagaaattggtgctgtcaattatgtgtcaaatgactaaggaaatgaaagctgtaatcacagaacaagtgacatgagaattccttcagatgactgggtagagttgcaaaggaaccaaattaaactcttccaaaggaaaactgtaagtattgaaataataggttgttaaacagcacattaggaacagccaaaggaggaagtgatgaactggaagacagatctgaagaaatcactcagattccaactcagaaaaacaagtaggtgagaaatatgaagagaggctaagagataaggaagacagaacagagagcccaacgcaaatcaaatcagagccccagagggagggaagagaaggaatgaagaataaaaggaattactggaagagaatggttgagaagtttgcagaatgaaagacagacacaaagtatatcaaaccatgtaaataaaaagaaatccatacctagacataatggagtgaaactgcagaacaccaaaaacaaaaaaattacaaagcagccagggagttaagacagatcacctacaaaggaacaacaattaggctgacagccaatgtcaactgcaacaacagaaaaggaacaaatagaaagcaaaaaagtaagatggtagaaacaaagtcaaatatgtcagtaatcacaataaatgtaagtagactaaactttaaagttaaatgacaaagactgtcagactacattgaaaatatccagctacatgttttttaaaggatgacataccttgacataaagtcactggaagactgaaagtaaagggatgttaaaaagatacagcaaatactaatcaaaagaaagcaagctagaaaggctatactactaccagccaaactagactaagaagtagtattagaataggccaggcgcggtggctcacacctgtaatctcagcactttgggaggccaagacgggcagatcacaaagtcaggagttcgagacgagcctggccaacatggtgaaaccctggctctactaaaaatccaaaaaatagctgggcatggtggcgggtaataccagctacttgggaggctgaggcaggagaatcgcttgaacccaggaggtggaggttgcagtgagccgagattgcgccactgcactccagcctggccaacgagagcaaaactctgtctcaaaaaaaaaaaaagtagtattagaagacagaagggttccatacatcatgataaaatggctgattcaccaggaaaatgtaacagttctaaatctgtgaatagaactaatctgtgaattgtgaataggctgcaaaatatataaagaaaacactgacagaattgatagggaaattgagagctctcttgtcccagagggagattaacttctgctgactgataagtcacagacaaaaggttaggcaagatggagatttgaatttattaaactcatagagccagggaatatgtccttcaattagaacatgtgaaaaaaggcaaaacaacaaaaacagaatatgtccttcaagaaaacaaggaatagtcacaaaatgtgatcacattccaggccatagggcaaatcttaccaaattttaaagaaattatttcaaatagaccatctgtgcaattgagctagaaataaatatgtattttttaaagatctatgtttgaaaaatttaaaaatatttaataatccataggtcaaagcatagcaagaccccatctctacagaaatcagaagggaaatgttaaaacaccccaaacagaataataaaaaatatcagtcaaaacttgggtaaactgccaggtgtgatggctcacacctgtaatcccagcactttgagaggccgaggtgggtggatcacctgaggttaggagtttgagaccagcctggccaacatggtaaaaccccgtctctactaaaaatacaaaaattagccaggcgtggtggcgtgcacctgtaatcccagctactcaggaggctgaggcagaagaattgcttgaacccaggaggcagaggttgtagtgagctgagattgcacagttgcactccagcctgggtgacaagagcaaaactccatctcaaaacaaaaacaaaaacaaaaaaaaacttaggtgaacaaaagtgagacctggtaaaatatatatagcattaaatgctatatatgctataaaattagaaaagattgaaaatttatgagccaagtagctaactgagaaattggaaacaagaaaaggaggtacgccagtactgttctcaaatccagaggtcctagccacaccaaaggggaaggatcagacagaacaaaagaaaaccaaaaagaatctgcaattcaataaaaatataattgtttagcaaggttagtccgtggagacactcaaatttgacccctatatgataacacaaaaattaatgtcactgtccatcagcaacagtgagtagtttaggagcttatatgaaatgtaaaagttgaaatattttatttattgatttttaagatggagtcttgctcttgtcgcccaggctagagtgcaatggcgtgatttcggctcactgcaacctctgcctccggggttcaagtgattctcctgcctcagcctcccgagtagctgggattacaggtgcatgccaccttgcccagctttttttttttttttttttttagacggagtctcgctctgttgcccaggctggagtgcagtggcgcgatcttggctcactgcaagctccacctcccgggttcacgccattctcctgcctcagcctccccagtagctgggactacaggcgcctgccaccacgcctggctaattttttgtatttttagtagagacggggtttcacggtgttagccaggatggtctcgatctgccgacctcgtgatgtgcccatctcggcctcccaaagtgctgggattacaggcatgagccaccacccctggccagtcattctatattttcttctaaaatatttcagccaggcgtggtggcaagcgcctgtaatcccagcactttgggaggctgaggcaggtggattgcctgaggtctggagttcaagaccagcctggtcaacgtggtgaaaccccatctctagtaaaaaatacaaaaagtaggccgggcacggtggctcgcgcctgtaatcccagcactttgggaggctgaggcgggtggattgcctgaggtctggagttcaagaccagcctggtcagcatagtgaaaccccatctctagtaaaaaatactagagatcgcccactgcactccagcctgggggaaagagcgagactctgtctcaaaaaaaaaaaaaaagacaatgtagaatgactttctgattttagggaaggatatttttcaagacaaatatcaactaaaataatcaacttccattcatcaagacactagaggtgacacttacaactacatttgacgactcagcaaagaaagtgtgatgcatgtatgcagacggaaaataatgcaaatagtggtcaaatgaaaacaaaagaagtattggcaatgaagtggataaatttggaacacttgtgcactgctgctgggaatataaaatataaaatgggctgagcacagtggtgcacacctgtaatcccagcactttggaaggccgaggctggcgattgcttgagttcaagagttcaagactagcctgggcaacatggcaaaatctgtctctattaaaaacacaaaaattatctgggtgtagccagatgtggtggctcacacctgtaatctcagcactttgggaggccaagatgggcaggatcacctgaggtcaggagttaaagaccagcctggccaacatggcaaaaccccatctctactaaaaatgcaaaaattagccaggtgtggtggcgcacacctgtaatcccagctacttgggaggctgaggcaagagaatcacttgagcctggaaggtggaggttgcagtgagccaagatcatgccactgtactctagcctgggtgacagagggagactgtctcaaaaaataaaaataaaaataaaaaaataaattagctgggtgtggtggtgggagcctgtagtcccagctacttgggagcctgaggcatgagaatcacttgaatccgggaggcaaaggttgcagtgagtggagatcacgccaccactgcactccagccagggcaacagaatgagactctgtctcaaaaataaaataaaatggttcagctgctgtataaaacagtatggcagtccctcaaaaaattaaaagtagaattatcatataatccagcagttccacttctggatatatactctccaaaactgaaaatggggtctcaaagagatacctgtacactcaggttcacagcggtattagtcaaaaagccaaaagttgggaacaacccaagcattcatctgtggatgaataaacaaaatgtgttccacccagacaatgaaatagtgttcagtctttttttttttttttttttttgagatggagtcttgctctttcacccaggccggagtgcagtggcactatctaagctcactgcaagcgccgcctcctgggttcacaccattctcctccctcagcctcccgagtagctgggactacaggtacccgccaccacacccggctaattttttgtattttttttagtagagacggagtttcaccatgttagccaggatggtctcgatctcctgacctcgtgatccgcccgccttggcctcccaaaatgctgggattacaggcgtgagccaccgtgcctggcagtgttcagtcttaaaaatggaattctggctgggcccagtggctcacgcctgtcatcccagcacgttgggaggcggaggtgagaggactgctcgaggccaggagtttgagaccagcctgagaagcatagcaagaccccatctctacagaaaaaaaaaaaaaaattaaaaattagccaggtgtggtggcatgtgcctgtggtcccagctacttggaaggctgaggtgggaggatcacttgagccctggagatcaaggctgcagtgagttgtgattgcaccactgcactccagcctcggtgacagagtgagatcctgtctcaaaaaaagaaaaaaaaattctaacacctgctacaacatggatatgccttgaggacattgtgctaactgaaatgagcacgtcacaaaaggacaaatactgtatgatgccacttatatgaggaacccagagtggtcacattcacagagacaggacgtaaaatggtgggtgtcaggggctgcaagaaggaggaacagggagttagtgtttgatgggctggagtttcagttttgcaagagcaaagagttgtggagatggacggtggtgatggttgcacgacatctaaatagactttttttttttttttttttttgagatggactcttgctctgtcgcccaggctggagtgcagtggcgcgatctcagctcactgcaagctccgcctaccaggttcacgccattctcctgcctcagcctcccaagtagctgggactataggcgtgtgccattagcctagctaattttttgtatttttagtagagacagggtttcaccatgttagccaggatggtcttgatctcctgaccttgtgatccgcctgccttggcctcccaaagtgctgggattacacatgtgagccaccacacctggcctacattttttttttttttttttttttgagacggagtttcactcttgttgctcaggctggagcacaatggctcgatcttggctcaccacaacctccgcttcctgggttcaagcaattctcctgcctcagccatccaagtagctgggattacaggcatgtgtcaccacgcccgactaattttgtatttttagtagagacagggtttctccatgttgatcaggctggtcttgaactcccgacctcaggtgatctgcttgcctgagcctcccaaagtgctgggattacaggcatgagccaccatgctcggccatctaaatatacttaatgccactgagctgcacatttaaaaatggttaagatggtgaattttatgttttgtctattttaccacaatgaaaaaaaattcaaagagaaaaaagattcaaagatgggcaacaatgtgaacaggtatttcacaaaaatttcacagaagagacatgaatcatgaataaacaggaaaaggtgctcaacttccctggtaatcagagacatgcatgttaaggccacagagggcatcattccatgtgacgagggctaggttggcaaaaatcaagccctatccatggatcttgattcatttaaaccttactgccgcccccttgggagattggtgcagtcactaccccacctacttattatttgaggggtaggtttgcaggtactcatatgattattttgctttataattgacatacacatcttctttgtatatatcaaacatatataattttaaaaactgaaaggcagggagaattggagaaggtaaaactcaagcagtcagcagggtcatgtgggccatggtgagggctatggtctttctcctaagaccgggggagtgtggtgccgggcagagaagtgatgaggtccaaattatatgttaaaaggatcatttaagaggccaggcacggtggctcacacctgtaataacaacaatttgggaggctgaggcgggcagactgcttgagctcaggagtgtgagaccagcctgggcaacatagtgagaccctgtttcaataaaaataaataaataaataattttttaaaaaaatgaaaaaagaggccacacacagtggctcatacctgtaatcccagcacttggggaggctgaggtgggtggatcacctgaggtcaggagtttgagaccagcctggccaacatggtgaaaccccatctttactaaaaatacaaaaattagccaggcgtggtggtgcacacccataatcccagcttgggaggctgaggcaggagaatcacttgaatgcaggaggcagaggttgcagtgagccaagatcatgccactgaactcctgcctgggtgacaaaagtgaaactccatctcaaaaaaaaaagaaaaaaaaagagctatagccatgagtgtccatcagagacagtgagagaggcaatgtcctgtcttccccaaagcccaacaaggttcaggagctgagatggtcactaatggggactgccttcaccccaggagcccactcctttgcctactcgtgctggacacggagccagttaaaccatcttggtcagattacatgagggagtgacagctgcggtggccccacgttgggggctgcacttaccaggctccaggcccagctcgagggtctcctcccgcaccacttgcaccagcatggccagcagcaggaagaggaaggcaaaggtgaggcagacagagcgctcacccccctcctcggcgctgaagtacagccgtgtcactgtcaggaacatcttgctggaggctggagctaaggaggcctcaggtgccactgccccactctgcccatttcaccacactccgtctgggaccccagaactccagggaacaagcactgctgcacaaataggccttggggatgacctagaggagttcggttttggggtgctggatctcagatcaggatgtgggctgggggttcccgttgagtgggagatggcctcatcaggccaccgtgtctgtacagcctcccgccctgggtgaccctgcctctttcacccacctcacctacttcacatcccttggaaaagcaatcagatatagaagggcttcatctccaatctgctgtcaaaatgcagcatgggggccagacacagtggctcatgcctgtaatcccagcactttgggaggccaaggcaggaggatcacttgagcccaggagttcaagagcagcctgggtaacatagtgagacccccatctctacaaaaaataattttgtggtagcccctgtggtcccagctactggggagcctgaggtgggaggatcgcttgagcccaggagtttgaagctgcagtgagccctgattgcaccactgcactccagcctgcacgacagagggatatcttgtctcaaacaacaacaacaggccaggcgcagtggctcatgcctgtaatcccagcactttgggaggctgagacaggtagatcacctgaggtcaggagtttgagaccagccctgaccaacatggtgaaacccagtctctactaaaaatacaaaaattagtcaggcatggtggcgcatgcctgtaatcccagctacttgggaggctgaggcaggagaatcacttgaacccgggagacagaggttgtagtgagcctaaatcatgccactgcactccagcctgggcaacaagagtaaaactccatctcaaaaaacaaaacaaaacaaaaaacaaaaaagcatgggaatctggggaaccagtggattttaagacaggtttcccactccaaaagtcacaggagtagcattctttctgtgcttcctcagacttgggtccccaaagtcatgtatttgctctctttgggaggccaaggcaggagaatcacttgaagccaatcaggaccagcctaggcaacaaagcaagatcctgtctcaacaacaacaacaaatatatatacatgtacatacatacacacacacacatatatatatatatacacacacacacacacacacacacaattttttggggggatgtagtttcgctcttgtcacccaggctggagtgcaatagcatgatcttggctcactgcaacctccacctcccgggttcaagcaattctcctgcctcaggctcctgagtagctgggattacaggtatgcaccaccacccccggctaatttttgtacttttagtagagaaggggtttctcaatgttggtcaggctggtcttgaactcctgacctcagatgatccacctgcctcggcctcccaaagtgctgggattacaggcatgagccaccgcgcctggctaatttttgtatttttagtagagacggggtttcaccatgttggccaggctggtcttgaactccagacctcaggtgatccgcctgcctcagcttcccaaagtgctgggattacaagcatgagccaccatgcctggagtatatattttttaaaattttgccaagggaccatatctttcttggccctgattgtggactggcctggtgatttccttaaacaaggagaatgtggtagaaagaatagggatggggtgggtgactttgggcaaggcattccctcctgcctcctggcatttctactgccaccaaagggcatgaccatgtggagtggagatgaaccgacctgctgagcccagcccagtctgtccacccacagagctggagcacataaaatgtctgcttcatgtcactaagcttggggaagtttgtggcacagcaggtgaaaactgccacaccagtttaggggagccagggaagctcaggtcctgctcccacccgccccactggcagggagcagagaggaaggatacatggagaaggtcaccgtgagcaggcaccagaacacagcaatgttagtctccttggctggtcccagcatgtagtagtaggcctctgtgaagaggtacacgccgcccgagtacacagcaaagtccacaaaccactggtactccaggaagaagcgcaggactgtggggggcactctgctcagccctggggcccagctcgctcccctcctaatagaacattcttccttcaaatcctccccacccccatgagggtgtggagaccttcagggctgagggagtagagtttagggatgggactgggctattacccagggcatccacggtcgtgagggggcaggtctccagctggaacggggcatctcggggcacagacagtggcttctcctcactaaggccattggcccacctgggaggatggtgacaagcaagagggacggtgagcacgcattccactgaggccagccaccctcagagctcagagcagctggcctggagaccatctctttccacaaccttggctcctctgcacactgggatatggggatccccccacccacccacaggactggctagagcaaactgccaggaaacagatgctaacttgacagtgaccatctccttggactagggtctcccggttcacctgtgcccagatcagcgcctggaagtatgggtgggccggtcctgtgtccctgagcccagagccccctgagcaggggtgaggccgttcctggggaggagccaccctcccaaggctggggctggggcccaggtcactcaccgctctttcctgcctctgggcctcggcttccccgccagggcccgaagctcctcctcagacgggtgcttgtatcggaacaaactgagagcaaggacgggcagtcagggaagctcaggcgtggggttgggaggttgaggcagtgaaccccaaatccagggattctagttagagggtagcctaggccaggggaacactgggaggtaggtgagggtacagcatggggaaattctggggaaatcgtgagaccaacagatctaggctgagtgggctccgggggcttggatacccctgaatctgctggctaactctcctggggaagccagtgtgtgcaacttttcttttctttttcattttctttttgagacagagtctccctctgtcacccagactggagtgcagtggcatgatcttggctcactgcaacctccacttccccggttcaagtgattctcctgcctcagcctcccgaggagctgggactacaggcatgcgccaccatgcccagctaatttttgtatttttaccagagacagggtttcactatgttggccaggctggtctcaaactcctgacctcaagtgatccacccgccccggcctcccaaagggctgggattacaggtgtgagccacctcgcccggcctttgttttttgtttttgagagaaggccttggtctgtcgcccaggctggagtacagtggcaccatctcagctcactgcagatttgactttctgggctcaaacgatcctcctgcctcagactcctgattagctgggatcacaggcgtgagccaccatacctggctaatttttaaaatattttgtagagacagggtcttgccatgttgcccaggctggtcaagtgatcctcccaccttggcttcccccagtgttgggattatgggcctgagctatcatctctgacgtgttttttttttttgcctttgtttttgtcacatacatttttctcaggagagaattcagttgccaccagattctcagaaagcatcacagacccacgcaaggacaaaaaccagagcaggcgagctctagcagatgcaggggtggaaggaaggctgggttacagggaggcaggaagagtgagggacgtggggagtgtggtgatggttccacacatgtgtacacctgtcaaaactagtccaactgtgtacttcaaatatatacagtttgtgtcaggcatgggaactcacgcctgtaatcccagcactttgggaggccaaagtggtaggatcgcttgagcctaggagtttgagaccagcctgggcaacttagcaagaccccatctctattaaaaatttaaaaattgtctgggcatggtggcgcacacctgtagtcccagctactcaggagattgaggcaggagggtcacttgagcccaggaggttgaggttgcagtgagctatgatcaggtcactgcactccagactgggtaacagagtgagaccctgtctctaaaaagaaaaagaaaaaacaaatatatgcagtttgttgtacttcaattacacctcaacaacgtttttccccccaccacccaccaaccaaaatcaaggctttgcaatttgtgaggcggggcgtggggagccagaagggggcgtgactccgcgggcccctcccaccgccggggcggggctcacctgccgttacagagcagccagcgcgcgaaggagcagtgtggcgccagcctgtgcatgagggtggcagtgagcagggtcaccaccagctgtactccgaggaccgcctggggggaggggacatgactggcagcacctgccagagggtcacaagttccctccctccctaggaacccaggctatttatagagaagtcaggctggatgggggaagggcgagcctcttaggctctagcggcttcttaggggagagtcctggggtgagtctggactcacctagcatggccctgccctcccacgtcagagatcaacacccaccctcaccacctagcgggagtgtagggcagtggagaccatgggatttgcctcccgcctccgctatggattcaggtataatattaatttcccggagtctcagttttctcatctggaaatgggtgcttcctatgtagtctcctgtattcctcaccaccaccttccagcccctaaccacgagcccgccacactcagtgaaagcggctcccaccgccttctgcaccccacactgtcacctagggagccactgcgtctcggttgagcttctagctttctccttcacctggtagctccttcccctaagtgtctcccaccttaagtgatccctgatggttccatcaccctcctccctcttcttccctttgtaattaacctccttgaaagggcgtctatgctcctggccacctcctgttttggtgtgaagacctacatgtctgagtggggtgagcttatttatttttatttatttatttatttttttggcaagggagtggtggggagaacagggtcttgctctgtcacccaggctggagtgcagtggcatgctggggtgctcactgcagcctcaacctcccaggctcaagtgattctcccacatcagcctccctagtagctgggattacaggcactcgccaccatacccaactaatttttgtctattttgtagagacagggtttctccatgttgccaggctggtcttgaactcctaggctcaagcaatcctcctgccttggcctcccaaacggttgggattacaggcgtgagccactgtgtccggcctatttttatttttatttttagagatggggtcttgctatgttgtccaggctggtctcaaactcctgggctcaagtgatcctcccacctcaacctaccgagtagttaggactacagtcatgtgccaacacacccagctaaggctttttttttttttaattaggaattttctcacccagttcttaattcagaacacattttcatatacttatttttaaacgttttagaagaatcagtctgtggtgaagctgggttttcctgcttgaatgcagtaaatacccatttgctgccagtaattacataattatgtaaaattatgtgctcaggagagctgtctactagtgttctggaattatcatcaaaatgaaataaagtttatttaatagtaaaattaattatgaaaataatcctttaatcaggcataaataagctaaatttagtcggaaaaaccctaatgtgatgggtaccgggcctagcacggtaattcaaaatgactgctgaggccaggtgcggtggctcgtgcctgtaatcccagcatgttgggaggctgaggcgggctgatcacttgaggtcaggagtttgagacgagcctggccaacatgatgaaaccttgtctctactaaaaatacaaaaattagccagacatggtggtgggcgcctgtaatcccagctacttgggaggctgaggcagcagaattgcttgaacctgggaggcagaggttgcagtgagccgagattgtgccactgcactccagcctgggcaacagagtgggactctgtctcaaaacaaaataataataataataaaataaaaatacataaaataacagactaataggacattttctctgtacctgtgacttgtaaactgagaccagaaatcttttttcagtaatgaggttggtggcggcatctttctcatctctaagtcctcattgctcgccctccccgggaccctagtgcagactggctggctggcacttagggaccatgagtgccagcccatgggcccctgcaagccagtgggtcagggctgttgaagccccacccttcccctaggaccctgccctcccaccccccagtctgtttttctcctctctctccgacctctctcctgtgacctgccagggttttaaccacccaatcagccagcccatcaaaacctcagcacggtgacacctccagcccagacctctctgctgagctcaaccagtagcctcctccaggctctcctgggagaccctagcactcacccatcatcccatacccttccaggtggttcaggcccttcccagtctcacagtcagcccccaacttggttctgcaccctgcaggcatagctagagaccatccctccacctccccacagctcagctctctcctcagccctccctgcacccaaccactggagtctcagaggtcttcctggacctttgggctcttcatcaatgaccccaccaccccccaaaaccccccaagggaaaaggtggtggaggggtgcatctctccacctaaggctcccagaggtctgtccagggatgttctgatggccctgccctccacccagcctcctgtctcagggtcagggctctgcagacatctgcaagaattttctggagtcttccatcagctccttcttttcccttcactggatttacgattctcgaactcaagaaccctgataaaatcaatgcagcctccctcctcattcccgggagcctgtgccttcatctcctacggcgtcctgcacctccgcctgggacgacgccccactttcaataattccggccatcagtgcccttccttcagggccatctccagcgcccctcctcggggatggtcccaggcagagaccctccagttccacgtccctctctctgcccaggccggtcccgtcagggttgtgggagtcccccatctccctgcaccagcctgacccccaggggctgggctaagttttaagaacacactcaataggttggacccagagccgcgtgagacctgaaggttccaactttcctgtctcccactctgagaaccttgcccgccctgaggccaaccagacctcctgagtccacctcccacggcctcccctgcccgttccacacaccccgatatagcagggacccccgatggatcctgtcggcgcggcccccacgctcctgcaggacccccgtccccagagtggacccccaacaggaccccacaccgccttaaccaggttccaaatgtgctggggtccccagtcccctctgtgggaccacgacccctcaaaaggatcccagacccctaaaaggtctcgagggcagaatccccagaacgcttaggggcttctagtccccctgggtacaactcccgccgactccctcggaggtcctgtagcgagagcagggctcccagagagggacacacggccttcagcgtgcccccgaatccctcagagcctccaatccccaagaagaaaccccaatccattccctcagtgtctccctggaccccttcggctggacctcggccctgcagaaccccccacttcgcgggacgctcgctcaccatgacgcgtgcgagaacgcggtgcactcacccaccggcctagggctccgggcactctgcggaaactcgaccaattagagcccgactctggtctgacgagcatcccgtccgaccaatcagtgtgtcttgagccggcaaatcaccagggacgaggaggccgctcgcgttgcatgccggaaattgtagttcagatacgctggttcggatcgatcaaagtgaagattgtgtctgggaggcctgcgtggccgacctctcttaaggcttagttttctctttcctacacttatctcaaaggtttgcagcgaaagcatttattcccacctaagggacatttctgagagtagaattccctccccccatcaagaacattcaatggctcccacttagtagacgaagtacttagtactcctaagtactaagtaggctaagtactcagactgaattcagacccttctgcctgacttaaatctgctgctagcactattgtgcaccctatagtacaacttgcacccaccatgctgtctcatacctccaggcctttgtaaatatcctacatcttgcaatgccttcaagaatgcctcaatcttaaaataaaaacaaaacaaaagcaaaaaagaatgcctcaatctttttcacctggcaagtgccttattcatctctatcagctaggactctggctgtgctccacaaaatatcaactaacatgggttcaagcaaaaaaggaaaatttttggctcatgtgacagaaaatactagccatagtgtcagcttcaggcgtggctggatcaaggaccaaatgtcagcttcagggatctgatgttctttatttcaccgctaggaggaaagggcttctggtgtttgtgccccggttttgccatttgtctttctgtggatgagtgtgtctgcctgagtgtagacatatattgggtatgactgagtgtctgagcatctttatgggggtgggttcctgtgtgtggggcctgagtaattaccttttcgtttttacattttattatgtatttgtgtattaatttttttttttcttgagacggagtttcgctcttgttgcccaggctggagtgaaatggtgtgatcttggctcaccgcaacttccgcctcttgggttcaagtgagtctcctgcctcagcctcccgagtagctgggattacaggcatgcaccaccacgactggctaattttgcatttttagtagagatgaggtttctccatgttgatcaggttggtcttgaactcccgacttgaggtgatccgcccacgtcggcctcccagagtgctgagattacaggcgtgagccaccgggcctggtttatattttatttttttaactttcggctggcaagtgctgaatcctaagcgcactatcgcacgccacctcgtggtggagggcaaaagcgcagtctccctgggatggagaagtcaaaccagtctcacttgtggccctgggggctcccagccttagaaagcggcccatagttttatggacctcacactgggtgcttagcctgtgggcactaacatcagggactggcctgacttcttgtccaccgtgagggtgagatccaaaggctgggaaggctctttctctctggccatgcctcagtttcccccagggtacccgctaccttgacccttttcctcttgctcagtccctggccctggtctggatgtgcggggttggggtgccagtgagtaggtaggtcttcagcccatgtggaaggaaggccaggatcattgtcggggaggtcctcagaacagaagggtgggtaactggctgaagagtttgcatcatctgtgcatgtagcagtggcgctgctggaggtggcaggagctgcatgctcagctggacctccacagccattgatcactgccatgaggaccgtggctcacccctcctgagtggggaagggacagaagggaccaggtgggaagtgttgaagacttgagtccagccaggcatggtggcttggcgtatgcctgtagtcccagctacttgggaggcttaggctggaggatcgcttgaacccagaattttgagaccagcctgggcagcacagcaaaacacccatctctaaaaaaaaattaaattaaaaaaaaagttaaattagcccaacgtggtggctcaagcctgtaagtcccagctactcaggagcctgaggtgggaagattgcttgagcccaggaatttgaggctgcagtgagtcgtgatcatgccacagcactccagccctggcaacatgacgaggaaaaaaaaagaggctgggtgcagtggctcatgcctgtcatccgagaactttgggaggccaaggtgggaagatcacttaaacccaggagttccagaccaacctgggcaacatggggaaacccagactatacaaaaaatacaaaaattagctgggcaggctgggcacagtggctcacgcctgtaatcccagcactttgggaggctaaggggggcggatcacaaggtcaagagatcaagaccatcctgaccaatatggtgaaaccctattgggtttctactaaaaatacaaaaattagctaggcgttgtggctcacgcctgtagtcccagtagtagtcccagctactggggagtctgaggcaggagaatcacttgaacccaggaggcagaggttgcagtaagctgagatcttgccactgcactccagcctagctgggcaaggtggtgtgcacctgtagtctcagttacttgggaggctgaggcaggattgcttgcacccatgagatcaaggctgcagagagctatgattgcaccaccgcagtacagcctgggcaatagggcaagacactgcctcaaaaataaaaaaataggccaggcgcagtggctcatgcctgtaatcccaacattttgggaggctgaggtgggaggatcacttgaggtcaggagtttgaaaccagcctggccaacatggtgaaaccccatctctactgaaaatacaaaaattagccgggtgtggtggcagtcgcctgtaatccgagctatttgggaaggacgagaatcgtttgaacccgggaggcagaagctgcagtgagccgagatcccgccactgcactccagcctgggcaacagagtgagactttgtctcagaacaaaaaaacaaaaaaaaaaacccaataataataaaaacaaaattaggccaggagcggtggctcacacctgtaatcccagcactttgggagaccgaggtgggtggattacctgaggtcaggagtttgagaccagccttgccaacatagtgaaaccccgtctccactaaagatacaaaaaattagctgagcatggtggcacatgcctgtagtcccagctactcaggaggctgaggcaggagaatcgcttgaacctgggaggcagaggctgcagtgagccgagatcgtgccattgcactccagcctgcatgacagagcgagactctctctcaaaacaaaaaacaaaaacaaaacaaaataataaaaataagtaagtagaaaagaaaaagaaaaaagacctgagtctgggttgggtgagcgaaatctctagccgcacttggacactctgcagaggcttcaagttcaccccatccaagtctcattccctacaagcttccacagcacagaggatgaaatgggagcttccagtcacccacggcacgctcttcccttcacctccacctccgagccgttctggagtcctggtgggtttgcctccacgcacacacagagagtgatcattccagggggcactgcctcccctcagctcccaatgccccctgccacgggagcctggggaggggcttttacacactttgatcatgccatatccctatcctggaaactggggccccaaagcccccacctcactggggatgagggtggcgaagatgacgtaggacaaaccttagctggggtctggggtgcagatggcatcctatactccgccgtataaacaagtgccccctccgggttctgtcacttatatactttgtccagtctccctatcccttaaaaggcgtcccgcccatcatcttgtctaggactgtgtgcgctaagggtgaaatgcaaggtgctcagttttactgaagaaatctctccctggggcgctgagtgacagaaaggattttgaaattgtcagtcaacgtaccccgcccattctggctgagctgtgccaaccagctcagctttggatcttggcagagtgattggaaagcaggtgagtttgtttgtttgtttggtttttgagatagagtcttgctctgttgcccaggctggagtgcagtggcgcgatttcggctcactgcaacctccacttcccgggttcaagtgattctcctgcctcagcctcctgagtatctgggactacaggcacacactaccatgcccggctaattttcgtatttttaatagagacgaggtttcaccacattggtcaggctggtctcgaactcctgacctcaagtgatccacctgcctcagcctcccaaagtgctgggattacaggtgtgagccaccatgcccggcctgtttttgtttttgtttttttactctttgagacggggtcttttgctctgttgcccaggctggagtgcagtggctcaatcatggctcactgcagccttgacttcccgggctcaggtgattctcccacctcagcctcctgagaagctgggactagaggtgtgcactgccacgcctggctaatttttttttttttttaagagatgggattcaccatgttgcccaagctagtcttgaactcctgggcttaggccatcctcccacctcagcctctcaaagtatttggattacaggggtgagccactgtccccggccaaggcggatcttgtaagtcttgatctcaacactcatgttttccgtcttcctgtccaaatctgtgaactccaactcacaaaggtgtttctcagcttgggacagtgtagaaggcgtcatggaggaagagaggcagagctgggccttggagggtgggaaggagtttaaaaaggagacaagttgggggttgagggaggcgctccaggaaagaccagtagggtcacatgttggtactgcaaatatttctaaggtactggagaggctgggacagggataggagaccaggccagactagggtagggcagctgaggagcccaacttccttctaaggatgaggaaaagcttcaaagagatgagcagaacatggcagaggcagatcttttaaattttattactgttatttttagagacaatgtcttgttctgtcactcaggctggattgtagtgggctggtaatagcccactgcagcctccaactcctgggctcaaggcatccttcctcctcagcctcccaaaggactgggattacaggcaagaagtaattttttttttttttttttttttgagacggagtcttgctctgttgtgcaggctggaatgcagtggcacgatctggatctcggctaactgcaaccaccacctcttgagttcaagtgattctcgtgcctcggcctcccaagtagctgggattacaggcatgggccatgaggcccagctaatttttgtatttttagtagagatggtctcaaatttctggcctcaagtgatctgcccgccttggccccccaaagtgctaggattacaggtgtgagccaccgtgcccggctagaagtcagttttttatgttgtcgttgtttttgatgttatttttgagatagggtctcgctctgttgcccacggtggagtgcaatggctcaatcacagcttgctgcagcctcgacttcctatgctcaggcaattctcccacctcagcctcctgaatagctgggactacaggaatgtgccagccatgcccagctaatttctttttaaattttttgtagagatcagggtgtcagtatgttgcccaggctggtctcaaactgctgggcccaagccatccatccactttggcttcccaaagtgctaggattacaggctttggccaccgcacccggcaagaagtcagatgttaagtattatgaagatctcactgaatgccatgtatggtggcttgcacctgtagtccagctactctggaggccgaggtgagaggattgcttgagcccaggagtttgagagcagcctgggcaacatagtgaggccccaactaaaaaaaaaaaaaaaatcccactgagaccacctggggtgcgtgaggccagatagaccctgctgcacctcaactattttctgggagcacccctgacctcaggacacccaagtctgtcttcacacacaggacaagccagagtgggggcagtttgcaaccccaggagtgggtatataaacaccctgctctcttgtcccctgggtagaatcaattgctgggtcaagggctcaagagatacacccattcaaaagatgagcagtcggcgaggctgggtggctcatacctgtaatcccagaactttgagaggcccaggagggcggaccacctgaggtcaggaattcgagaccagcctgaccaacatggggaaacccgtctctactaaaaatacaaaaattagcatggtggcaggtgcttgtagtcccaggcactcaggaggctgaggcgggagaatcccttgaacccgggaggcggaggttgcagtgagccgagatcgcaccactgcaatccagcctgggtgacacagggagtctctgtctcaaataaaataaaattaaaataataaaataaaaaataagaagatgaacagttcaggggcgcttccagcgccctgggagcccgacattcaggattcccagctgctgcttttgggagccctacgacccagccctagggcttgcccctgagcccatgacccacagcgccgggagcagccctggccattggccctggagtggaaagagccggggccctcacccctggagtgggaccattctaggtgcacgctcactctatgctgtccccagaaccccccgcgggctaagcaccctctgcttgtgcgcgtcccctgcagggctcctcccgccttgcctccccaaccctccacctggcagccctcccggacaccccacgggctcttgagtcctcgtctcagggcttctggagggggcaccccaagccaagactaggcaagaatgaggcgagtcacagtcagtctggtccacggacgccacgcgcgttttatttgtggatatacacacaaataggaagaaggaaaggagccccccagggtggattgagtccagccgcccacctccaagcccccaccgcggaggggggcgtcactgttgggtcttctctgaagaggcctggagggaggtggggtccccacgtgccctcgccgtacctggcgagcgctctgggctggtgccaccgggtgatctcctaccggggccagccgtcggccaagggcagccggcgcagggcgggcccaggccgcagaggctctgccagggaccgggcgaggagcaagggataggggaaggtcttaggaaagtcgccggggcccccgggggccggagagaggcgctcagacttgatgctgactgggggggtcggcggggaggcgccgcgggttgggggaccctcctcgcccaggcttcggcccccactgcagggggaaagagagagggaggccgtgagctcagcgaggaagggaaggaagccaggggatggcacagcgtgggcaaaggcttggcaggaggaccctgggaaaggagggggtggcggtccctcttggggcctcaaaatagctgcccatccgtaccggaagtgtgcgcagtaccagggatggccaccaggggtcagcagcggccggggctttggaggactgggacttgccgtcgtctcagggcacttacctgggctgggaggacacggcggggggcccatcacccctcgagggctgccagggggccagggtggggggctgcaacaagccagggggcggtggagggtctcccaggccatattctggtgggcaggaattgggggctgaggcctggacatctccttaagccttctgcaaacctaaccacccccagtgacagttttgagttctggtgggtgggagggtgtggaacccccagagggcaggagtgcggacgcttcccaggtggggcagggcaggttaggggatgtacctggggggcctccggggaggaaggggaagctccccagtgggggtccgggagttgcagtggagcaggggttctgcaggccactgtagaggcttctctgtgcggagagagggtgaaggggaaactgaggcccacacccaggtcgccctgcctgccctcatcagccctgccacaccctcccctcactcacggaggtgtttagtccccctcggggcccagccaggccaccaggcaggtctgacctccgcccttccgtcggcaggtacagtgggggtggtgtcttgctggtgaggtggcttggtgagaagagagggtgcaccaggcctggggaagaggagaccccagagagagaggacaggcaggccatgtcaactaatgaagtctgaggtttagaggtgatgcacgcagcctggcaatgccagagccaagatgcacccaaacagcccctcaggacctcacccctgccccactgtcccatgctcacctgggggcccggctttgggggctgctggtcggaagggagatgggcggctctgggcgggcagtgcttccccaagcccactggggtcacagcctggtggcggtaaggccccgtataccacatctgggctgggcatagcaggagctgcaggctgtgggtagagaagggatgggtcagaggaccccaggccagatgggggtgccaagtccaagggagaaaatcctgatgagttcaggggcccagctctaccttcaggaagcctttgctccacctcccaccaggctccctacctgctcctccccctgccctaaccctacaggctgggggagcttctgtctggctctgcctgtccttgacaggtaggtccagagccaagacctctcacttagtgtagagttggcactgagggggctgcacagagtgtttgatgaatcaaagatgaaatgaaggaaggaactgtttgcctgttgaactcttattcatccttcaaagccccagctacagtgcccacttctcaaagaagcctttcctgaccaaccaggtagagacctgcctccaaactctaggatccctggctctaagcccctctctcagtaccagcctcaacgacttgggcctaggaagtaggaggaatgcctcattcacagggccagggagtcacttacatacagccggggtcggggcaaggccggatcacccccttcgcctgccagcctccgaaacttctctcctggctcctcaggcccttcatccggctccagctctggcccatcgaggccaatgcccctccgcttcagcgtctatggggacaggagacaacagggtagacccttacccctaccccacccagggaacccagttctatgggagaggggacagaccatccccacccagctccatgagtggggaggaatgcaggcatggcctgctctagccaaaccccactgaccaaaccccggtgagttaccagctagcagtttcctcccctgggaccgaaaagcccaaggacctgcccagatcaacacagcaggagctgagatccatgcaggcctgttggcgctgtcctaatgctgctcctgacatgactccaggacctccattctgcccccacttgcagcctcatagcctggcatcaaaagctgcttaagaggccgggcgcggtggctcacgcctacaatcccggcactttgggaggccgaggcaggcagatcgcttgaggtcaggagtttgagaccagcctggccaacatggtaagacctccatctctactgaaaatataaaaattagccaggcatggtggcgtatgcctgtggtcagagctatttgggaggctgaggcaggagaatcacttgaatccgagaggcggaggttgcggtgagctgaaattttgccactgcactgcagagtgggcgacaaagcaagactcattctcaaaaaaagaaaaaaactgcttaagaaacgccagcagatttcctgagctgccttctcctggggccacagaaccgcatgctcccggaccccaacctcttctttgccaacttctgccccacacttccaaaacactgcggactcccaggcctagtcccagcccgctgctctctgcagcccttaggctttagcttcccatcccagtgaagactcctctgtcttatttatttatttatttatttatttatttatttatttatttattttttgagacagagtcttgctctgttgcccaggctggagtgcagtggctcgatctcggctcactgcaacctccgcctcccgggttcaagcaattctcctacttcagcctcccaagtagctgggattagaggcatgagccaccacacctggctaatttgggtatttttagtagagactgggttttgccatgttggccaggctggtctagaatccctgacctcaagtgatctgcccacttcggcctcccaaagtgctgggattgcaggtgggagccaccgtgccctgcccgatgtgctttatttctgctgtccccagaagggctcccccactcccaaatgtttggatgagtggagggtcccttctagggacagcagaaataaagcacgtcagccacaaagccagatgaagacactcatcttttgtgcaaaccaagagtccctgggctctgagaaagcagcgtgcacggggccttgtggggctggggaggaggacctggggtacctcgaggatgtcagtgttggtgcggctctcgtggggctcgctgtactctgtgtacttcagcagcacacggtccatgtccgtgctggcatactggaagaggcggttggcgctgttgaagatgatgagggctatctcacagtcacagagcacgctcagctcataggccttcttcatcagcccgaacttccgcttggtgaacgtcacctggacccaggacccacaggggcaggggagagaagaagaagagatgaatgtggggtggtgtaggggaattggcagggcctaacccttcctcgaacatgcctcaggattctttctggctgagctggtaattctcatgtcacaacctggcaaactcctactggagcttcaaaacccagcccaaatgtctgggaagtgtgccttggcttcccaggcagagtccacatgctctctctgggctttcccagttctgggcctccctctgttctggccctctgagttaggtgtggctgtgtcaagctccatctcccctatggctggggttccagtcatcagggagaataaatgaataatgatcatgaaaatgagcaggccaggtgcggtggctcagcctgaggtcccagcactttgggaggcccaggcaggaggattgattgaggtcaggagttcgaggctagcctgggcaacatggtgagacccctgactctactaaaactacaaaaattagcctagccaggcgtggtggtgggcgcctgtaatcccagctgttcggaaagctgaggcaggagaatcacttgaacccaggaggcggagcttgcagtgagccgagatcgctccactgcactccagcctgggcaacaaagtgaactccatctcaaaaaaaaaaaaaaaaaaaaaaaggaaggatggaaggagggatggaaggaaggagggaaggagggagggaaggagggagggagggaaggagggagggagggaaggaaggaaggaaggaaggaaggagggaaggagggagggaggggaaacaagaaacactgacagaccaggcgcggtggctcacgcctgtaatcccagcactttgggaggccgaggcgggcagatcacgaggtcaggagttcgagactagcctggcccacatggtgaaaccccgtctctactaaaactgcaaaattagctgggcttggtggtgcgcacccgtaatcccagctactcaggaggctgaggaagaatcgtttgaacccgggaggcagaggttgcagtaagctgagattgcaccattgcactccaggctgggcaacagagtgagacttcatctcaaaaaaaaaaaaaaaaaaaagaaaggctgacatggcatcaggactcctcatgcctcctcattcccctgcagttcaattggtcaggtcagtcccttgcctaggccatgccccctgctaggaatgtctttcccagccactgttccacccagtgaactcacctgccgattcctttggtccaggatgcgggagatctggatttttttcctccccatcgtcccaggctgagtggaatgatctttgtctaggaggagaagagggagaggacagagtgagtgggtggagagtggggaggggtaccccagcctcacacctctcctctgtctgcccctgccagccactgagaggaagatgatggggaaaatcaaggcaggctgggtcactgtcgcagaccccgcccccggccagccttaggatgcagtagaggctcaatgaacatgtttagaccaaatggggcatggtggctcatgcctgtgatccctagcactttgggaggccaaggcaggaggatcacttgagcctgggagtttgaggccagcctgggcaacatgttgaaaccccggctctacaaaaaatgcaaaaattagccaggcatggtggcacacgtctatagtcccaggtactccggtggctgaagtaggatgatcacttgagctggggaggttgaggctgcagtgaactatgatcttgccactgcactccagcgtgggcaacagagacccagtctttaaaggaaaaagaaaacagaataatagaaacgcctcctgctctagcaggaggatgcaggcacactctggaaaggcctccagctcagagtccttgggccagggtgtgggcctggcatccacttggtgacttggaagaaatcctgtaccccactcaaggagatgtgagatcgccctggtaggggtcccagaaggaggagactgctggactatgctggggtccaggccttccccagagacccccactcgaggttcctgggaacaatcgaatcatgtggcctgtcctgcagccgccgccctctgtacagacgtcccctgacaccacaggggacgtccccgctccgccaactgtgtgaccacactccacctcccagcctctaccatgtcacaggtgactgaggcttcaggcaaggggcctctccagggtcacgcggacctacgctcaggcctggccttccctctgaccctcagggcagccctcagcacagaagaccctttccccaggcctcagtttgctcttctgtgaatgggctggtaggaaatgctgagcacccaccaccaggcttggcaacaagttatcaagaaatccagatcaggccggtcacggtggctcacgcctgtaatcccagcactttgggaggccgaggcaggcagatcacttgagatcaggagttcgagaccagcctggccaacatgctaaaaccccatctctatttttttttttttttttttgagacgagttttcactcttgttgcccaggctggagggcaatggcgcgatctcggctcactaaaacctccgcctcccaggttcaagtgattctcctgcctcagcctcccaagtagctgagattacaggtgccctccactatgcccagctaatttttgtatttttagtagagacgaggtttcaccatgttggtcaggctggtctcaaactcccgacctcatgatccacccatcttggcctcccaaagtgttgggattaccaccgcatcctacccaccccatctctattaaaaatgcaaaaattaaccagctgtcgtggcgcacacctgtagtcccagccacttgggaggctgaggcaggtgtgtcactgcactccagcctgggtgatagagcaagactctgtctcaaaaaaaaaaaagaaaaagaaaaagaaaaagaaaaagaaatctggcttggcgtggtagctcatgcctgtaatcccagtattttgggaggctgaggtgggtggatcacgaggtcaggcgttcgagaccagcctggccaacatggcaaaaccctgtctctactaaaaatacaaaaattagccaggcatagtggtgggcacctgtagacccagctactcaggatgctgaggcaggagaatcccttgaacctgggaggcggaggttgcagtgagccgagatcccgagattttgacaggctgggcaacagagcgagactccgtctcaaaaacagaaagaaagaaatccagattgttctctgggagtgttctcagggcttcccagacccctgcccaagcggtctgggcaaggccctccattatcccagggcccagaagtgttagatacctcggctggcagatatggcatgctgtgtgaccccaggcacaccctctgccctctctgggctgggtctctgagcccccacaactatgtagagcccaagctgtcagtcccagaccctcagctccggcttgacttgctaaatttaacctccagggctaattttaatccccagccggaatcgggcctgttcccacggctgggatatgttgcccccaccctgatgggtccctggggggtggacgggggccttggtccggaggtcccagggccaagatgactccggaaatgcccctgatgcccagggtcccacgagagcagcagcagggctggggcttaggcctgagtctcttaagcctggaagacctgactcaagccccttctcactctgtctgtccccattttagacacagacaccatggctagggcagaggtcatgtgatgggggagaactgggaagtctctctctgcactgagaccctgagagctgagatagaaagtgagttccaggcagaaggaagagcaggtgccagggccctgaggagggacaagaaacagcgggagggtggggatgaggccacagaggttgggccattctaggactccttcttttgggtttccttcttttaatttaatttattattattatcattattttgagacagagtctcactctgtcgcccaggctggagtacagtggcatgatcttggctcactgcaacctctgcctcccgggttcaagtgattctcccgtttcagcctcccaagtagctgcgattacgggcatgcaccaccacacctcgctaatttttgtatttttagtagagacggggtttcaccatgttggccaggctggtcttgaactcctggcctcaagtgatctgcccgccttggcctcctaaagtgctgagattacaggcgtgagccaccacgcctggccatatttatttttttgagacagtcttgctctgttgcccaggctggagtgcggtggtgagatctcagctcattgcagccttgacctcccaggctccagtaatcctcccacctcagcctcctgaatagctgggactacaggtgagtgccaccacgccctgctagtttttattttctttttgtagagatggagtctcactatgttgtctaggttggtctcaaactcctggctggaagtgatcctcctacctcaccctcccaaagtgctgggattccaggtgtgagccactgtacctggcccactgtgggccttctgagctggaggagggctgtggattttggtctaagagtgatgtggagctatgagagcatattttattttatttcctattgtattttattttttatttttaatatatatatatttttgagatggagttttgctgtgtcaccccggctgaagtgcagtggcgtgatcgcggcttactgcaacctccacctcccaggttcaagtgattcttctgcctcagcctcccaagtagttgggacaacaggcatgtgccaccatgcccagctaatttttgtagttttagtaaagatggtgtttcaccatattggtcaggttggtctcaaactcctgacctcatgatccgcccgccttggcctcccaaagtgctgggattacaggcatgagccaccgcgcccagccttttattttattttttgagacagaggcttgctctgtcatgtaggctggagtgcagtggcacagtcttcacctcccgggttcaagcgattctcctgcttcagcctcccaagtagctgagattacaggtgtgcaccaccacacctggctaatttttgtatttttagtagagacagggttttgccaagttggccaggctgatcttgaactcctgacctcaagggatccgctggcctcagcctcccaaagtgctgggattccaggcgtgagccactatgagaaggttttaagcagagaagggatggggcttggtttattattttaagactcagctcatggcttccatggggagcaggtctgttggaggccagggtggagatcatgggcggctggagagaaggcaagggctgtgtccgtcttgacagagactgggggtagggccccctctgtgctaggcctgtgccttgcactttaagtcactgtactccagggtgcgttagtcctccagaagccagcaggccctacaccaactctggaggcaggcctgacaggtgcagatgaactcacgcaggagtttcactctcctgaaccccagtgacattggaaccaaagccatcctccactctagcccctgagggaatctacccaaccaaacacagctctgagcatggccccctcctgctcatacactctccatggctccccactgcccttatgagaaagttctagcacctagcctggcattcaagtcttcttcccaaatcagctcttgcctacttctctctcttcgataaatatctctgactagaaggaccctttcccctttttcaccaagccaactcctatccaaacgtcaaaacccagttcaaaaaacccattcctctaggaagtcctccctgccattcttctggtctcccagagtcaccatcctcctctaggtcagattccatggcattgggggtatatatatccagatttgtctcctccagactaaaagcccctctggatcagggccaggaatggacagtaaggtttggtgagcagagtagatcaacagagatgtcactgaccccctccacaaccctacagcttccctcaacaacttcctctcagactgccccagctgataccctgcccagaaatacatgcacatgcaaatccagccactcagcattgacctgtctcgggcccaggtgtgaagggccaggcaaagaatgcggaggcggcaggccagagtgtgcatgtatatttgtagtcacatgcaaatccctgcccagagccgcagacagaccctggtggcccattctccagatgttggtgtgatcggaactgctgggggaggtggcagcacaggctgaatgtgccaggcacgaggggggaagctgaggtttggggaggcctcttccgcacacacataccctccctgctttgtccagccagaaatcagagagctgtggcatctgcccagcgcagaagcacagaggtggacctattgaccaaggaatggagcacagaagaaagaacaggagaagaaacccaggagagcttcttgggggaggaggcatgtagttggatgtagacgcagaggctggatgggagcctgagtagaaggggagggaggtgggaatttgaagctaagagtccagtaccttcctactcctttcattgcaccctcatacttagcgtttattaagtatcaacctgtgcaagtcactgagccaagctgacctcagaagaagtagaaagcttaagtagaccaacaaccatagaagattagaaaggtgactcaggacctaccattaaaaaggtaataaagtgggctgggcatgatggttcacacttgtaatcccagcactttgggaggccgaggtgggaggattgcttgagcctagcggttcaagaccaacctaggcaacatagcgagacccctatctctaaaaaaaaaaattttttttttaaaggcaataaagttcaaggctgcagtgagctttgagctgctgcactccagccagggcaacagagtgagactctgtctctaaaaaagaataataatttcaaaattaaaataataactaaaaaacatgtttaaaggcccaggtggttttacagctattttctcaaatctcacagaacaggaaagtgcagcattatttcagtgaacttagatctttgaaatagacgggatctagccgagtcactttttttgtttttgagatggggtcttcctctgtcgcccaggctggagttcagtggtgcaattatagctcactgtagccttgaactcctgggctcaagtgatcctccagcctcagcatcccgagtagctgggattacagctatgtgtcaccacacccagcaaatttttaaaaactttttatagagatggcgatttgctgtgttgcccaggctggtctcaaactcctggctactcccagatacttccagctacttgagaggctgaggtgggaggattgcttgaggccagaaattggagaccagcctgggcaacacagcaagaacctgtctacaaaaaaagtaaaaattagctgcacgccgtggcacacacctgtagtcctggctatgtgggagcctgagacgggaggattctgtgagcccaggagttcaaggttacagtgagcgatgatgatcttgtaagctcttccacttccagctctcatgcattgctggtggcagaggaaaaagggacaagcacttggataatcctctggcatctactaaatctgaacagatgcctaccctgtgacccaggaattccgctcctcgatgttcaatattcacgcaagagaaatgggtccaagttacacctgaggacacagacaagaatgttttctacagcttcatacatcattgcctcaaactggaatcaacctggaagcccttaatgggagagctggtcaacactttcttgttgattctatgatcagttatagcacagcacagaaaaagggtgcactctcgctgcacacaaccacgtggatgaatctcagagaccattggccaattcgacgatcccagactccatcgagaagatgcactgtgtgattttatttacatgaagtttcagaacaatcaaaactcactgatgcagctgggcgcaggggctcaagcctgtaatcccagcactttgggaggccaaggcgggcagatcactggaggtcaggagtttgagacaagcctggccaacatagcgaaaacccatctctactaaaaatacaaaaattagctgggcgtgctggcatgtgcctgtaatcctagctactcgggaggctgaggcaggagaatagcttgaacccaggaggcggaggttgcagtgagccaagattgtgccattgcactccagcctgggcgacagagcgagactctgtgtcaaaaaaaacaaaaaacaaaaaaccctcactgaggctgatggatatcagacagcactttggtcaccctgggcagaagctgtgattaggcagtggcccaagggggaagtcccaggggctagggaagtcctgttcctggatccaaggtttgggtacacagatatgttcagtttgtgcaaatgtgttgagctcaactctagtggtttgtgcatttttcttcgtgtgatttatttcaaaaggaagatttctttttttttttttgaagtggagtctcgctctgttacccagactggagtgcagtggcatgatctcagctcattgaaacctccacttcccgagttcaagcgattctcctgtctcagcctcctaagtagctgggattacaggtgcctgccactgtgcccggctaatttttgcatttttactagagatgggttttcaccatgttggccaggctggtcttaaactcctggcctcaggtgatctgcccacctcaggggccaaagtgctgggattacaggcgtgagcatgggcgcccccggcccaaaaggaagatttctaaaaagctccagccagagcaacatagtgagaccctgcccctaaaaaaaaaaaaaaaaacaaactagggccaggccaggcacggtggctcacgcctgtaatcccagtgctttgggaggctgaggtgggaggatcacttgagcccaggagttcaagaccagcctgggcaacatggcaaagccctgtctgtaggaaaaaaaaaaaaaaattagctaagtgtggtggcatgcctgtggtcccagctactcaggaggctgaggtgggagaatcacttgagcccaggaggtggaggttgcagtgagccaagatcacaccactccactccagcctgggtgacacagccagacgctgtctcagaaaaataaataaacaaaaataaaaaaatttagccaggcgtggtggtgcaccccttagtcccagctactcaggagtctgaagtgggaggatcacttgagcagggggaggcagaggttgcagtgaactgagatcctgtcactgcactccagcccgggcaacattgtgagactgactcgaaagtttttttttcttttttttgagacagagttttgctcttgtcgcccaggctggagtgcagtggcgcaatctcagctcactgcaacctcctcctccccagttcaagcaattctcctgcctcagcctcctgagtagctgggattacaggcacacaccactacacccagctaatttctgtattttcagtagagatggggtttcaccatgttggccagactggtctcgacctcctgacctcaggtgatccaccagtctcggcctcccaaagtgctgggattacaggcgtgagccacagtgcgtggcctaaaaaaaaaaaaaaaaaaaaaaaattaaatctagcggggcatggtggtgcctgcctgtagtcccagctacttgggaggctgaggcgggaggatcacgtgagcccaggagatggaggctgcagtgagctatgagtgggccactgcactccagcctgggtgacagagtaagaccctgtctctaaaaataaaaaagctccttgctgcttatggctgctgtggggagcagtgtctgttcaggctagagtgaggtgacaggaagaggctgggccagtgggaaatacagagtttgaatggagacaggggtggcacctgggcagaagtggtgaccaaagggtgcaggatgtgctggtgacctgggatagaagaggagcctggtgatcccaggcctgagcgatgtgggggtgagggggaattgggaggacaaaagaagagctcaggagtgcggaagcatcagaaactttctggcagtatctgtggtcactaagtcaatcaacaaacattaccctgaagtccttcaagccatagattatcatctccccagcctggcgaggccccttagccccccagtaatggagatggggtgctggagggaatcccacccttccactgacccttcccctctggcctctctgcgtggtaggactcagttctcttacctgttaattgggggtgagaatccttctcccaccagctgggaagagggtagggagcaggggtctactgaactttttttttttttttttttgagatggagtctcgctctgttgcccaggctggagtgcagtggcgtgatctcggctccctgcaaccactgcttcccaggtttaagcgattgtcctgcctcagactcccgagtagctgggattacaggtgcacaccatcacacccagctaattttttatatttttggtagaggcggggtttcagcatgttggccaggctggtctcgaactcctgacctcaagtgatccgcctgctttggcctcccaaagtgctgggattacaggtgtgagccaccacacgggggcctctattgaacttttcttctggcttctgggaaaccaaaaggaagaaggtctgggccttggaactgggggcgctgagtcagtacagcatcctgcaagaccaccttgaaatactgtcatcagtcacctgcttcctcccccataaaatgggtcacaggatcctaacctcacaggctttgcagaggggtttaagagaaaagattaggaacaagtcaagttccctttcttggcacccctgcgggactttactggggggatgagctgcagagtcacttcgccagacccctgagcccgcagggaggccacggcttggcagaggaacccaggccgggaaaggagaagtgagaggcaggtgggttgggtgggggtgggggtgagggcccgcgggaggcggtgaagcggggagggggcgctgctcccggcccctgcagcgaatcaggcctgccgccccgcctcacgcaacccaggctgtggtttcatcacctgctccccaagtacctcattatgggcgacaggaagagccccttggaaagccaggacccctcctcccctctcctgggggctccagcggctccgaccccagctgcaggcgaccctccctccccagccagagccctgggcccgcctcctccccgggggcctagggaggtggtacccaggtgggggggcatgtaggtgacctggcggcctggctcagttcacagcggtccctggagccccgcacctgccctcagggactcaggggagacggtgggctcgggcagtgactcccctgttgctgagcttctctggaactcagtttcctcctccagaaagtcagggggcagcaggggccacctcgctgaactggggggaggggcttcacagtaaggtgctttacagatgcggggaggatttgtggtcgatgggtcctgatgcctctcagaaggccttggggtcacctctccatcctgggggaacccagctcagattgcgggccccaaaaagtccctggtggagtgctgagggacaggggcggatggggttgggggtcactccatccttgtatgggcataatgggaggtagaaatattccccacacacggagacccccaaacagagccgcagaaaatccacagatgcccgaaacaacagatcccccaaatacacaagtattcctcctgcgaaagtccccaaaatacatgcagttcacgatacgccaaaccccccaacccacacagctctccaaacacacacatccccaaaacacatcctattccctctgcatagacagaccccaaaaacactcagacatacccagatgccccaacacatgccaatcccccaaatgcacagacacatacagatctccctaaacacatggccgtcccgcaaatacacacagacccctttcccctgaacaatgtggagacccccgccagacgcatgcagactcttccaaacatatgcagactccccccaatccatgctggtcccccattacataggtagggcccccccatccctgcagtgataccacccacactctagctttcttcttttttgttttttttttttgtgagacagagtctcactttgtcacccaggctggagtgcagtggcgtgttctctgctccctgcaacccctgcctcctgggttcaagcgattctcctgcctcagcctccccagtagctgggattacagccatgcgctaccacacccagctaatgtttgtatttttagtacagacagggtttcaccatgttggccaggctggtcttgaactcctggcctcatgtgatctgcctacttcggcctcccaaagtgctgggattacaggccaccatacctggctgggtttcctctttttaattattattatttttttttgagatggggtctcgctctgttgcccaagctggagtgcagtggtgccatcatagctcactgcagcctccaattcctgggcttaagcattcctcccacctcagatttcccagcagctggggctacaagcgcacacctaatttttaaccagactatgccaggctaattttttttatttttgtagagaaggggcttcattttatcacactggctggtcttgaacttccggcctcaagttatcctcctgcctcagcctccctaagtgctgggattacgggtgtgagccaccacacaggcctggctgccttcccaaggccgggtgctctccacccaccaggggtgaaatgcaggctgggggcatctgaggctagatttgaatgggtagtgtttgaatccaggattcttagaatgttccagctggagaaggccccatgggggtccttttttccataggtccctctggcacccatggggaaagtgaggcccagtggggagccctcagaccctccttcccacctctccctgggcctgctcctgggagggacagctcctgttcgaggggcaggagtccacggtgagtgggaccctctgtgggacgccccctctacttcactccaggatcccattttggccatgcacagagaggccagggccggggctgtaggccagtcagtccaggattcaaatcctaaacccgccacttgcccactgcgtgatactttctgagcctcggtttcctgtgtttgcaggggtccccacaaactccccatgtacccacccacctctcccctcacttgaaaaggtgtcatctaccagcagactcccagcccaccttctgcccctttgggggcatctgcaacaccagccccaaactgattccctacttgcccatcactctccctttgcccggactgtgtccaaccccgggacacccttctaggtttgcccaagtccaggagtgtctccatgtcctctaaagacctgcagaaaacgctctttctggaggcatcaatcttttttaatatttattttaattttttcaggcagggtctcattctgtcacccgggctggagtgcagtggtgtggtctcgactcactgcagcctggccctcccggactcaagcgatcatcccacctcagcctctggagtagctgggagtagcacggcgccacacctagctaatttttgtatttttttagagccggggtctccctgtgttgcccaggctggtctcaaactcctggtctcaagtgatcctgctgcctcggtcttccatagtgctgggattacaggtgtaagccaccacgcccggccaaattcaactctttctgcagcacctcagccctatcagactttttggtgtgtgtttctttattgctttctttgatgagcatctcgccctgccggcttcccagcgcctagtacatagaaggccctcaatcacccttccttgaatcaacgaccaaacaactgcttcacagacagaagaaacactgccaacttgctcagttttctgtttttcttttttctttttttgagatggggccttggtctgtcacctagactggagtgtaatggcacaatctgggcctactgcaacctccgcctcccaggttcaagccaatctcttgcctcagcctcccgagtagctagggctgcaggcgcctgcccctccacatggctaattttttgattttttgacatcttattttttgtagagacagggtctcactaggttgcccaagctggtcttgaactcttgagctcaagcaatctgcctgccttggcctcccaaagttctgggattatagaggtgagccaccacacccagccctacttgttttttcttgagatgggtttcgctcttgttgcccaggctgaagtgcagtggtgcgatctcagctcaccgcaacctctgcctcccgggttgaagcgattctcctgcctcagcctccctagtagctgggatcacaggctcgcccccaccatgcccagctaattttttatttttagtagagacagggtttctccatgttggtcagaatggtctcgaactcctgaccttcaggtgatccacccacctcagcctcccaaagtgctgggattacagccgtgagcccggccctacttgttcacttctcactgaaacacctcatggtccacacaacaaatttaaggccccatccagcccacaggctgccagtttgtggcccttcctctaaacaaccttcacagcaaaacagccaattggacagtgctgatgctcctctcaggccaaggaactggccctctgaaggtcccactgcccagcttgggagaaaaccacgtccaggtgaccatccatggcaaacctgacctggcacaggcaccctcacctgccaagaaggcctgttccaggccgggtgcggtggctcacgcctgtaatcccactactttgggagaccgaggtgggcagatcacttgaggtcaggagtttgagaccagcctggccaacatagtgaaaccccatctctactgaaaatacaaaaattagccgggcatgatggcgggcgcctgtaatcccagctactcaggaggctgaggcaggagaatcacttgaacccaggagtcagaggtcacccagcccatggagccaagacagaccccgcagtctgaatttgaccctgctgtcccatgcaggctagagtctaaggccctctcaggcccctagtgatgtcccctaagccacagtagtggctgcagggacagcccaaggttttcctctctttgttccagagaaagctctccctgcggggcctcagaaatggatccccagatgccccagcctccctgcttgggaaattagcacatctgtcagcgctgggcagaagggaccctgcccacagcccggcagcccgaagatgcagccagcagggaccccgagatggggctttaggacactgtcagtccccaatatcttcccgcagaaatgtctaggagcccctcaggtgctggggatgcaggagcagggggtgggcagagcaaggcctccccccatcacccagtctgatgggggaggcaacagcagccacataaccgtatctgggaagacggccttcaaggaagaaattcaacagggggaggcagtggagggtggcagggagagagctgctttggacagaggatccaggagggtaccacacctgtaatcccggctactcaggaggctgaggtatgagaattgcttgaacccgggaggcggagattgcagtgagccgagatcgcaccactgcactccagcctgggtgacagagcaagaccctgtctctgaggtgtctcagggaggtgggagccaggtggacacaatggcaggtgcaaaggccctgaggtgggactgtgctaaacaggtggcttccaggagcaggcaaaccccacacatctggggtggagtgagccaggagtggccagagacagagaaggtcagagaggcattgggggacagagagagggtggactgtagagcaatagggagccatggaaggtgtgtgaggagggggaggactgtggtctgatttggaattttcagaagaccctgtggcctgttggagcaggaagccaggccagcatccagccagggatggtagggcttggaccaggcacaggccacaggttggaacagtgggcaaggcaggcccatgcccacagcagccatgactcttattacaatccacctccatttctcccttcctcaggccccaccttgaccttgggtgaaactgggcttggagggaaacagcacctggcagagggcagagaggaaaggggcctggatgggctcacaaacacctccacttggtcacagcccagatgggaccttctgttattgagcccttactgtctgcccgggcccacaccccgcctcatttacatataagacctgcctgacccccagacaccccagggaagcagcgatagttgccctgttttgcacaggagtgggcaggcttcttccagggccacatggtgagacctccagatccccacccaatcctgggcttgtaccccagggccatcacgtggcacctcaatctcaccacccccacccaggctgggaagtgggcctgggcttgtccagcccagaatcaccgtcacagggtccaagaaactcaatcctgggccgcagggtatcagggtaaccacacaagtccccaagatacagccccagagaggccctttgggggctgagaaatgggatttaacttccttgcccaccccatggggaatcatgggccagggctggggcgagttccctgaccccaaaagggatcccagacacatttctaagtcgtctcagaaaaatggcatctggttgggctcatgcctgtaatcccagcactttgggaggccgaggcaggaggaccatttgagctcaggagttcaagaccagcctgagcaacatagggagacccccccatctccaattaaaaaaaaaaaaaaagccaggcaaggtagcactcccctacaatcccagctactcgggagactgaggtgacaggatggcttgagcccaggagttcaaggtcacagggagccatgactgcaacactcaaggaaagacagaaagacatctgtctctagaccactctgtgccttgaatcttccagaagggcagggcgtggtggctcatgcctctaatcccagcactttggaaggccgaggtgggctgatggcttgagcccaggagttcgagaccagcttgggcaacatagggagaccttgtctctataaataaataaataaataagtgggccaggtgcggtggctcacgcctataatcccagaactttgggatgccaaggtgggctgagtgcttgagtacaggaattcacgaccagcctgggcaacatgacaagaccccatatttataatttttttttttaattagctggtcacaggctggccacagtggctcacgcctgtaatcccaggactttgggaggccaaggcaggtggatcacctgtgatcaggagtttgagaccagcttggccaacatggtgaaactctgtctctactaaaaatacaaacattagctgggaatggtggcacgcacctgtaattccagctactcaggaggctaaggcagaagaatcgcttgaacctgggaggtggaggttgcagtgagccgagattgtgccactgcactccagcctgggcaacagagtgagactctgtctcaaaaaaaaaaaaaaaaaaaaaattagctgggtgtgctggtgtgagcgcgtattcctagctcctcaggaggctgaggcaggaggatcacttgagcccaggaggcagaggttgcagtgagctgagatcacaccactttactctagcctgggcaacagagcaagatgctgtctcaaaaacaaagaaagaaagaaagaaagaaagaaacctcttccagaaggccaaacacccaacatgtctacactcactgcacccaagttggggtgagcaaatgttttaaattccccttctcttcttaatttgcattttccagatgtccacctggttgggtcatagtttaaccaaataaatcattcgttgggatgggaaagccaagagtgggttcagcttgctccgctcacaggagctgccacaaagttcagagaggggcagccacctgttggggggtcacacagagaggagggagaggaagctgggcctcgtgaccccagcctctgttctcttgggggactgaggcatggccttgagctccatccttttttgaggggcctagtgttactacctggcctcagccttccctcctgcaaaccagcttcctgctctctaagatgacatcccaagatcctaactgtcctgaaattctgtttgctggaggccaagcttccccctttactgaacaacaggaaggggacatgagggaacaagcctgcctttttagaaagcccttttcatctctggaaatcagtcctcacacactggttctccgaagtcgaaatacttttttgtatccagtttccttcactccaagagtctgagagttcttgtcccgaatgcccaaggtccaggggccctgcccttccccagggatgattcttggccaggctagcctgaggccttgattattgttttgtttctttcttcttttttttttttttttttttttgagatggagtttcactcttgttgcccaggctggagtgcaatgacacgatcttcgctcaccacaacctccgcctcctgggttcaagcgattctcctgcctcagcctcctgagtcgctgggattacaagcatgtaccatcatggccggctaattttgtatttttagtagagatggggtttctccatgttggtcaggctggtctcgaactcctgacctcaggtgatccgcccgcctcagcctcccaaagtgcttggattacaggtgtgagccaccgcgcctggccatttttttgtttcttttctttctttttgtttttcttttagagacaggatcttgctctgtcacccaggctgcagtgcagtagctcagtcatagctcactgcagactcgaactcctcggatcaagtgatcctcctgcctcagcctcccgagtagctgggactatacacataagccaccacacctgcctaattaaaaaaacaattttttttggccagatgcggtggcttactcttgtaatcctagcactttgggaggctgaggcaggcagatcacatgagaccagcctggcaaacatggtgaaacaacgtctctacaaaaaatgcaaaaattagctggtcatggtggcacacgcttgtagtcccagatactcgggaggctgaggcagaaaatcaatcacttgaacctgggaggcagaggttgcagtgagccaagattgagccactgcgctccagcctgggtgacagagtgagactctgtctcaaaaaaaatttttttttaaagccaggtgcaggggctcacgcctgtaatcccagcactttgggaggttgaggcaggtgaatcatttgaggtctggagttcaagaccagcctggccaacatggtgaaagcccatctctactaaaaatacaaaaactagccaggcggtagtggcacgcgcctgtaatcccagctacttagaaggctgagggaggagaattgtttgagcctgggagctggaggttgcagtgaacaaagatcaccactgtactccagcctgggcgacaggatgagaccctgtctcaaaaaaaaaacaaagaaagaaaagaaaagaaaaagaaaatgggggtctcactatgttgcccaggctggtctcaaactactgggctcaagtgatcctcctgcctcagcctccaaagtgctgggattacaggcatgagccacagtgcccggccagctatttctgactaattgggtctgcaactaggggttagggtggccaaggacacaggtcacccatatctgcagccctggaccccaaaagagatagggagggaggactgtgaccgtgaaagtaatgctgccaccaccttgtcatgtgctaacaaccacacggggatgtgactcttgttcctgtacccattgaggcaaagggaggagagttggccccggcagctgttgctcccccgttccaaggttttgtgcctaccatcctgctgtgacaaacgagtgtacacccacagcaagaaggcatagggttgtgcacaggggatgcgctaatgctaaaggagtgcacaccaggagagagggacatcacatgccacatcacagagctcacagacacataatagggcctcacagcaccatgattttggacacacagctaactctccaactccccaactcacaccaaatctcagacgcagagcccttggacacacaacttccagacccacacccttcagacacacaccccttggagacacaaccccctcctgccacaacctcggggactcaccaccccacgacacacacccctttagacacacaccccaccctgggacgcccagcagtacacccggacctccaaaacccacccagcccgcagaagccgttcagaggacaccacaggagtctcaacccgatatgacacgcacctgctcggcctgggccctgggacgctgggcgcacggacccgcggcggctgcacgaagatcaggggcccgcggccgcaggtgccttgggagcgggcggtcctgcccccgggagctgattgggcgggacgggcttatttgcatacagggcgtcaccctggaggcggcgatgggcgtgcacttgggcgtggccccgacccgggagttcatgggcctgggactcagacgcgaaaggatgctggggcgccatgggtgggggcgcggataaggaagaagcagaacggagggagggggctggatcagactggccaggctttccccgccctcactgggcgcccttgaccttactgccgacccctgaccctactgtgaccctaaccctaattctaaaccttttcctaactcggcccaacttgcctggattgattccatcctgagtgaaatagactccgatcccggaccccgtcgccccgaggaaccaagcccttctcgcaggcaacgctgaccctcgcgctcgctagaatggaaagactgcaagacggggctctcgggtggcctgtgtggcctcactcaactgtgcctcctggggccagatatgtgctcccacagggagtgacagaccctccgcagctactggtccctcaagcccgcaccgcctgcccctccacagtccaagacaaccacactgcttccaccaaccacttccctctccttacctctccccgctaaaggctgttttctaaacttcaaaggtcagctgtgaggggccttccaggattggaccccagcccagaactctaaatccaccccttcccctgggatcccagcacaggccagacccacaggaagatcagagcaggggttggtgaatgtatcaatgtgaaaagaattacaggataaagatggctctgggatgggcacttctggagaagcccccggcccgtctggggcaggcaggggatccatgcactcccctaaccctgtggggtcaggcttgggccagaggagggatgggaggctgggacaggccagaattggggcaagggctgtgccagaggagtcagggagggtttctcagaagagagggcatttgtgctgggctttcaagtatgtgtaggagtttgccactaggagaaaggtttttcttgtttttttcttcaaggcaggatctcactgtgttgcccaggctggagtgcagtggcatgatcatagctcactgcagcctcgacctcctaggctcaagcaatcctcccaacttagcctccccagcagctgggactacaggcaggccaccaccaggtccagctaattttgttttttttaagagaggatgtctcactatgttgcccaggctggtcccaaactcctgggcttaagagatccttcctcctcggcctcccaaggtgctgagattacaggtgtgagccactacacaagacccgagaagggctttttcaagagggaaaagcacttgcaaaagtgcagaggaagagcatagaacattctctggccggggaagatgaggaaggtgaagccagtatagcgggcagggggtgaagaggaggggcagatacaggtggagagcaatggggctgcaaagctgcctggtgtccatctcctccagagaagagaggggctggtcccccaaactcagggggaggcatgtggcagatgctggagtgtgggggacactgagacagggaacagggggcctgggaggcttgtgtctctccccacacctcagtttacccgtctgtgacatgggcagtgtgggcctctagtctgagcacaactttctctttggacatgaaaactatagagttcatactgtgtcatcagtgggtccctcctgtccccatccagtgcccagtgccatacactggggtgccccaaggacatgccagggcctgggccaggctgggggcttctgcctccactccatggtgcagaacaaggcttggggagtgtggaggtggctggggagccctgggcccccggagggctgctctgtttaccggaggccacccgcccacctctgatgcaacaggcaggctctggttacgtgaggccggcagctgggccagctctgggggaagggctagcccagcagagcgaagctggctggggctggcccttatgcaccccaactccccagccccctccttctggtgggcaccatcttgttattcatggtctgtcccgtgtccttttgcctctgttcctatcctataccttccccaaccactaattgtgtcccctagcagggccaccaagagtcttaacctcattcttctcagatgaagggacacccttagttgctagagtaagaggttggaaggtagaagggaaggttgtgaggaggaagggatagaagggtccagagtgggtggtgagggagaagagtgacctgggaagcaggtctgggagatgggggaggtggtgggtgggggatggaggagaaggctagggtgggaggctgggggaggtggagaagctgcccccgctgtctccctcctccagattctctcccctctcccaggagaaggctttgaaggaccttccatgataaggatgtgtgacccagtaggtagggagggccctgaggttaaagaaccctgagtccccatcccagctgtgccgcccactcactgtgtgacctcaggatggtcactgcaccccttggggcctctttgctcatatgagaagtgtggataggctgggcgcggtggctcacgcctgtaatcccagcactttgggaggccgaggtgggtggatcccgaggtcaggagatcgagaccatcctcactaacacggtgaaaccccgtctctactgaaaatacaaaaaattagccaggcgtggtggcaggcgcctgtagtcccagctactcgggaggctgaggcaggagaatggcgtgaacctgggaggcggagcttgcagtgagccaagatcgtgccactgcactccaacctgggcgacagagcgagactctgtctcgaaaaaaaaaagaaaaaaaaaaaagccaggcatggtggcacacacctgtaatcccagctactcaggaggctgaggcaggagaattgcttgaacccgggaggtggaggttgcagtgagccaagatcacgccactgtactccagcctgggtgacaagagcaagactctgtctcaaaaaagaaaaaaaaaaaaaaaaaaagaagaagtggggataataggagcccttaaggcccacctccaatgttccctcctccaaaagccttcctatcctcttaccacttaggatccttccacctccccacccttccttccagcttagcactgatccagggggcggggtagagtatgtggctggttctgtgtcccccagcctgggggttccttgggcccgggcccagtgcatggtggcaccaaaggggtgtctccacgggtttctttcttttcattttttagagacagagttgctctgttgcccaggctggagtgcagtggtacaatcatggctcactgcagccttgaactcctgggctcaagtgatcctctcgcttccatctaccaagtagctgggactataggaatgcactaccacacctggctaatttttaaatttttttttgaggtgcactgggtgtctcgcttgttgcccaggctggtctcgaactcctgggcttaagcgatcctcctgccttggcctccaaaagagctaggattatggatatgagccattgcgcacagcctccatgggtttcttgaagaactggagaatctcaaagaaggtctaagcagtgaaagggagtgggggataagcctggggcacccagaagccttgttcagggatactgtagggaaaagaaaaaaaaaaaaaaaggctttccaggggcctgagtgtgcaggactctccgggaacccagaggagtaggtctgaaataaaaaccaggactcacaccaatggctaaggacaaaaacccagcggaagtctgattcttgtcctgaccactgtggacggagcagggggcaggtcgctgccctgtatgggtctccttttaccccatctgcagatcagggttgggatcctttctgggtgatctccagcctcgtgagcactatgcttctgtttggatgccccatggcacggagagctcactgtctctcttctagctgcctatctctggagttctgccgggagttaaattttttttttttttttttttgagacggagtctggctctgtcgccaggctggagtgcagtggcgcaatctcggctcactgcaatctccacctcccgggttcaagtcattctgctgcctcagcctcccgagtagctaggattacaggtgctcaccacagccagctaatttttgtatttttagtagagatggggtttcaccatgttggccacgacggtctcaatctcctgacctcgtaatccacccgcctcgggctcccaaagtgctgggattacaggcgtgacccaccatgcccagctgggtgttttttgaaatggagtctacctctgtcgcccacgctggagtgcagtggcgtgatctcggctcactgcaacctccacctcccgggctcaagcgattctcctgcctcagcctccagagtagctggggattacaggcatgcaccacacccagctaatttttgtattttcagtagagacgaggtttcatcatgttggccaggctggtctccaactcctgacgtcaagtgatccgcccacctcggcctccgaaagcgctgggattacaggtgtgagcccccgcgcctggccagtaaatgctattgagtgagctctaggagtgcccttgctctccaccctgacaagggaggctgcgagctcttgttctgagagccctctggcctctcagaacctcagtttgctctctgaaaaatgggagcgagggcatatagggtgaaaaagggtggagggtcacagtgtgcccaccagggccagccaggactgcagacaatgaccgctaggaggctgaacttcccgccaacgctttgcctcttgcgccccctggcggctagagtgggcggggcgccctccaggcaaaaagggctatcgagcattcaaatgagatgcaaattaaccagcgcccccacaagcccttggactcggggtgacgaggtgtctgacaacccagagtcttgatcagatcccttttatctatttatttatttattattttttgagacagagtctcgctctgtcacccaggctagagtgtagtggctccatcttggctcactgcaacctctgcctcccgggttcaagcaattctcctgcctcagcttcccaagtagctgggattagaggcgcgcaccaccacacccggctaattttttatatttttggtagagacagggtttcaccatattggtcaggctggtcttgaacccctaacctcaggtgatctgcccacctcagcctcccaaagtgctgggattacaggcgtgagccaccatgctcagctattttgtttttttatagagacagggtctctccatgttgccaggctggtctccaactcctggactcaggggttcctctagtcttgacttcccaaagtgctgggattacaagcgtgtgccaccgcacccggcctagactccttttaagagatgactgggctgggcacggtggctcacacctgtaatctcagcactttgggagaacgaggtcaggagttcaagaccagtctggccaagatggtgaaaccccgtctctactaaaactacaaaaattagttgggcgcagtggcaggtgcctataatcccagctattctggaggctgaggtaggagaatggcttgaacccaggcggcagaggttattgtgagccgagatcgcgccactgcactccagcctgggcgagagtgaggctccagctcaaaaaaaaaagagagagagatgactgttagtcgctggttgaggttgcatccaggggctatgagtgactcagagccctagaagggtctggtggggccccccacacctgcctccctcacccctagctcctagcgccccagacatcctaggcaggtcctgggaggcaggcaataatcccattctgctgccagtttgtcctgaaggtctgagcaagagggctggctcacaaataccagtgtttgctggagaaatggtcgcacgaaggacagatggacattgagaggtgccttcagagcaggtaagaagggagaaggactctggaggccacacaccaatcagtgccctaaatggggtggctttaggctcctccccactcctaagctgagtaggacagtggagaggtgggataatggcacagaggccccccagtgtgacctagaaggaggagaggtagggctgaaccccctttccaggccttcagatgccttgacaggcccgatgtcctaacaggatgccctctgtctcccctcgggacacccctgctcttcccatccgtctccatcaaccaccccacagtgccaagctgagggaccctcccagagcagtgactggaacctgcctcgaccccaaacaactcttatctgacctccctaatacattgtactggaacaagggattctggggtaactgcattggcacacagctggccttggagatgcataacttgtggaggcctggtcacccaggcttggcattcacagtggtcagtgcaggcccttctgcaaacagcagcagaaacggactcaaagccattttggcaaaaatcataatttaggggtccatgaaactgaagaaatgaaattggctagtgtcaggtacagttggatccagggctccacacaatgttctcaggtccccccggaacccctcgccccggcctggttcccatacacccagctcaaccttcctgatgctcctggtagaactcccaggaaaggtcgctcattgggtcacgtgtccatctcaaaccaatcactaggaacctaggacaagggagctctgattggccaggccgaggtgccacatccaccactggaactaggggtggcttctccatgtggcctgagcctggggtgggcgttgctgcttgaggcagaatgcaggttgggagggtagatctgcgaatgtccaactcagcctgtagagaaggtgcagtccagccttccttatccagatgaagaaagggagaaccaaggctgggtgcggtggctcacacctataatcccagcactttgggaggctgaggcgggaggatcacgagctcaggagtttgagaccagcctagccaacatggtgaaaccccgtctctacaaaaaatacaaaaaattagctgggggtagtggtgtgcgcctgtagtcccagctacttgggaggctgagacaggaggatcacttgagcccaggaggcagaggttgcagtgagccgagatcgtgccactgcactccagcctggatgacagccagatcctgtcaaaagaaagaaagaaagaaggaaggaaggaaggaaggaaggaaggaaggaaggaaggaaggaaggaaggaagagaaaagaaaagaaaagaaaagaaaagaaaagaaaagaaaagaaaagaaaagaaaagaaaggaagaaagaaagggagacccagagagggccagcaccaggcctatgtcacacagcacatcagaggcaggcagggctgggaccaaaccaagccgggctctgctcttctctgactgtgccctttttttttttggttggggggcggcgggtgcgaagtctcgctctgtcgcgcaggctggagtgcagtggcgccatcttggctcactggaacctctgcctcctgggttcaagcgattctcatgcctcaacctcctgagtagctgggattacaggtgcccgccatcacacccggcagagcctctttttgtccatatgtatttgggggtgagacctgccttttggggctgaggatgaaatgagatgacccctgtgaagactttagcccagggccagggacttgataggtgcataatcaggattattttgatggcagttattggtccaagggtcgatggggggccagtgagagtccaggagcagcaaagccacttctggacttctgggaacatggacggctgggcctggaggctccgggcaggtgcaggaggaatgctggccacactcgttcagtcttcagtctctgcctggcccagcttcagtcaggctggggagcaggggcaagggccagggtggtctgagagacagacccaaggcatgaggcagcacctgagggatgaccccgggccagactaaggtggagcttggtggtcagaggtccgggtgggaatcctggcatttctgggcgtgggcgatgaccctgagctggctgccttacctctcggggcctcagtttcctcttctgtaaaacagggcagtgcttaaggtcctgggacaggagagggggatgacttgaccctgcgaaggtcactgatgaccccaaagaggcgcagttttgggggaaaagtgggaatgaaagcctctgaggccgggcgcagtggctcatgcctataatcccaggactttgggaggccgaggcgggcagatcacctgaggtcgggagttcgagacctgactgaccaacatgctgaaattccatctctactaaaaatacaaaaattagccgggcgaggtggcaggcacctgtagtcccacctactcgggaggctgaagcgggataatcgcttgaacctgacaggcagaggttacactgaaccgagatcgcaccaccgcactctagcctgggtgacagagtgagactccatctcaaaaaaaaaaaaaagagagaaaaaaaaagcctctgagatgcggcatgaggctggcggttccagggagaggcgaggaactctgcagggacaaacgtggatgagacacagagcaatcctgccgggcagcagcagcggaggggacagcagacgctgggaagtgaggagggcagcggggcagtgtcctcgaggcacaaagtaggagggaccagggtgtgggggatgggactggggagacagaggctgggttgggggtgtgggcagggctgcgtagggcactgggctgggctgctgacccactcaggcagcccctcctgcttcaggccccctggaaagctcccaggccacccctcagcctgtgggattcctcaccaccccacatccagagctaagcctgctatgaacaggtactcaggaagtatgcatcaactgccagaggtactcagtaaatgcttgctgcctgtggtgtccagtaagcgctcactgattgactacagtgcccactaagtgctctctgactgcacacatgaattcggctgcctctgggctctggggctacagcttgaaaggcctacagaggctctgtctccacctgcctcccctcgacctctgagagggcttccatggcacatggcaccgaggacaatcacagtgcctggccaataggcaggggctcggtaagtccccagggcccctttgacctgcctgcgtctgcccatcacagatatagaatggtgacacatcagatctttcctggcaccacactctctaagcgtggtcagccacacctcccacagctcacgctgcacttgtgcggtcctctcccatctggtcctgggcctggccacgtgactggcctcaacggatgggccacccacaaatgtgaaaccagcactctgcatgggagccgctctcctggctcccagccaccaggagaaacccgggctggcctgctggagaggccatgaggaaaatctgacccctgctgccaacagtcctggccaagggaccccctgactatgcaggtgcagctgagctcccatgagcaccacatgggtgagccccagggacagcagcagaaccacccagctgagcccagcccaaagtgcagaatcatgagtaggttaattactggggctgtaaaccactgttttgggatgctgtgttatgcagcaatagccgactgctccaaagcacatccgtcactgtgccctgcaccctcttggtcacctgagagccacctttacagaaagtaaatgcagagaccagagagggtagtgaatttgctcggtcacacagcaggtaggcagtagatgggtggggaggtcccagagataggtgggtaattgcccatgccgggctctgcctgagagactgtgcacgggtaaagcaggctgctggcacgtggtaggatagaggaaatgtgggctcccttctctgtcttggggggtggaaatctctgggactagcatggggcctatggcctggaaaagagagaggaaggtggtggagagagagtgggagagatgggctgacatggtccctgagcagcagggtggaacattctggacctgcagacacccctccacctgccacctccgaaatcatcccacaagcccagtgagaaaccccaagtggttagacaagcaggtgcctgcctggctgccaagcgggcgggttggttagttcagagcagagagagaggctcgtggctaccctcggcactgacctgggttggcggaggctggggggccccgagtctcttccaggatcaggctgaggagggcgggggtggttcctccgggctgcaacaaaacatgtgcagcatccatgaggccaaggtcagaggccacaaggcttgctcagctggctggagtgtatgtttgggtgatactctggtctcaaagacctctggcttgagcttctggggcatcctgcttaaaagtgggatgagtgggccaggaacggtggctcacgcctgtaatcccagcactttgggaggctgaggtgggtggatcacctgaggtcaggagttcaagaccagcctggccaacatggcgaaaccccgtctctactaaaaatacaaaaattagccaggtgtggtggcaggcgcctgtaatcccagctactcgagaggctgaggcacgagaatcacttggaacccagagagggaggctggagtgagctaagatcgcaccagtgcactctagcctgggcgacaaagtgaggctctgtcttgaaaaaaaaaaaaagggacaaatggctgggcccagtgggtcacacctgtaatcccagcactttgggaggctgaggcgagagaattgcttgagcccaggggtttgagaccagcccagggaatgtatcatgaccccatctctatttaaagaaatatatatgtatgtttttaaaagtgggacaaggcactccagaggccacgtctgcaactcactcacacaagactgggcacttcaaacccacagggcttacaaagagaggtgtcagcagcaactcaagctgctactaatatctttcaggagtgtgttgcgtttttgaaacagcaggcacaaacagggcatatgaaagcatttttggaaaccctgagttgacagtaagagctatggcttttcagtgaagtctagatccaactgccaatgccaacccatggcagagaagccagatgccgctcctcttcagatgcaagagagcccagataaacccttcatgctaccgtttgagggaagattgctacactcccattcttacacatacactcaagtcttgtttctgcaattttcgcgtcttagttaagcaacacagatgctttctttcttttgcccagtgggggacaggcctgccagaaccccaatctgtgggagccagacgcatcccaaggcgacattcctgctcctggcacatgagtgtgtgttcataagcgtgtttattaacttagaatgccaacaaaaacaaaaagaagggctactcttcaaaaattctctttccaatgttcaaggactgtgagtgcttttcgttttcagacccctggtcctgggcttaaagcctcccttggctctgggtcctgggacagggagaggcccctgccatctccctggccccatctcccccagctggccggctccagccacagaagccttctcggtgcttctcgaacactcccagggatcccagccccagagcgtctgccctcaccactgccccacatggaactccgtctgcccccggatcgtctctgtctgcatgtaactcatgccacctcctaggaggggccccgcagtgttcttcacagcgcatctgacatgctcttgtctgccatgtttacctggttgtcgtatgtctccttgtgagcctgtctgtctcggtcactgctatgtccccagtgcccagcccagggccaggcacacagcagagcgcaggacctcggtattaagtgactgaactcaggttatagatgccacaggacaagaggaggtcaccagacaccaggacaaaaggaaagagacagttttctaataagcgagaagcagcggttcccagcgcagctgagagacggtccttgcagctgggagtggcagtgggggcgggcggtcccaggagctacctgtggccctgggcactggcattcatatggtcccggatgctgatggcctgtttgagcagaccctccacgctgcggaagtagacgctgctgtccaccaggttcttcacggcgctgaaacgggaggacaggcctggtcagcgctccggacctgcaggtaactgtcccacaccccagcacttgaggtcaccaccagggctcggtgggtacctcagtgattctgcgggcttcccgaaggactcacagtgggcttacattttagatttccctgctatgactagatgacatctgtgcaacacagcacattctctgccactgaaacatctaatgttttgaaggagggatcagtgtataaagatgtcataaaaaatatctcggccattactgctgataatgggggtgtaaaaaataggaaagaaaaaacacctgggcactgtggttcacacctataatcccagctactcaagaggccaaggcaagaggatggcttgagcccaggaggttgagaccagcctgggcaacacagcgagaccccatctcttaaaaagaaaaatctgggatgggcgcagtggatcatgcctgtaatcccagcactctgggaggctgaggcgggtggatcatgaggtcgggaggtcaagaccatgctggctaacaaggtgaaacctctgtctctactaaaaatacaaaaaaattagccgggcgtggtggcggccgcctgtagtcccagctactcgggaggctgaggcaggagaatggcatgaacctgggaggcagagcttgcagtgggctgagatcgcgccactgcactccagcctgggcgacagagcgagactccgtctcaaaaaaaaaaaaaaaatatacatttcactacagacaaatgttcgctggcctcccgcctagcccagtggtatctggggcaacttctgtggtgatgaaaatgttctttatccattgagatggctgagaggcacctggaatgtggctagcgggacttgggagctgaatattttttttctttctttttttttttttgagacggaatttcgctcttgttgcccaggctggagtgcaatggtgtgatctcggctcactgcaacctccgcctcccaggttcaagcaattctcctgcctcagcctcccaagtagctgggattacaggtgcccaccaccacacctggctaatttttgtacttttagtacatgttggtcaggctggtctcaaactcctgacctcaggggatcctcctgcctcggcctccaaaagtgctgggattacaggcgtgagccactgcgctcagcctcattttgtaatttttttttaatttttaatttttttttttgagacaaagtctcactttgttgcccagactgagcacaatctcagctcacagcaacctccgtctcccaggttcaagcgattctcctgcctccgcctcccaagtagctgggattacaggtgcccaccaccacacctggctaatttttgtatttttagtagagatagggttgcaccatgttggccaggctggtcttaactcctgccgcaagtgatctgcccacctcggcctcccaaagtgctgggattactggcgtgagtcactgcacccagtttcattttaacgagttaaaattgaagtgtgcttagccacccatggcgtaggttcctggattagatggcacagctagaggaagcagaagaaagcataggttttttgttggtttttttttttcctttcttttttttttttttttttgagacggagtctcgctctgtcgcccaggctggagtgcaatggcgtgatctcggctcactgcaagctccacctcccgggttcatgccattctcctgcctcagcctcccacgtagctgggactacaggtgccaccacacctggctaatttttttgtatttttagtaaagacgcggtttcaccgtgttagccaggatggtctcgatctcctgagctcatgatccgcctgccttggcctcccaaagtgctgggattacaggtgtgagccaccgcgcccggtctgttttttgtttttttgagacaggatcttgttctgttgcccaggctggagtgcagtggtgcaatctccactcactgcagcctcaacctcccaggcttaagcaatcctcccacctcagcatcccgagtagctgggactagaggtgtgtgccaccaggctcggctagtttttgtattttttgtaggaatagggtttcaccaggttgcccagactggtctcaaactcctgggctgaagtgatcctcccacctcagactcccaaagcactgggagtacaggcgtaagcccctgcacccggccgtatttctttcttctttagaggagaggtctggctatatcacgcaggctgaccctgaactcctttcaaggcatcctcccacctcagcctcctgagtagctggaactataggcgtgcataaccattcccagctctagcaactcctatttcttttcttttccttgagctaaggaagatactgtctgtctggtcaacccttgtcccaccaagggggccaaggctgccaatggcagaatactgccccagcagcaggatttcttgtctaggcaccttcgcccacacaaccaaacagcaacacaccaagggaactgctgggagcatcattcagccgccaataaaatggcccacagcccatgtcaggtgcaaacagcatgtctgtgcaaagtcgaggaacttccaaggccaactgggcaacccgaggcaaccggaataaggcttgggaatacagtcacgaggaatggaaccaaagcacaggaggcaaggggtcagtaacaaaaagaaacaccggccaggcgtggtggctcgcatctgtaatctgagcactttgggaggctgaggtgggtagatcacctgaggtcagaagtttgagaccagcctggccaacatggcgaaaccccatctctgctaaaaatacaaaaattagccgggcaaggtggcgggcgcctgtagtcccagctactcgggaggctgaagcgggagaactgcttggacttgagaggcggacgttgcagtgaactgagatcatgccactgcactccagcctgggtgacagagtaagattctgtctcaaaaaaaatttaaaaataaacagccatatctgtgctttgggcttccccctggctgccatccaccccactggcccatctgtcctggctgtgggagagaaatgctggtccccagaggcatcttccagaatccctatccctctttcctgtggcagctggggaggggctcagcacagggaagagacccacctggggccctggccaagtgaatcgtggtacagaccccatacacccactcgggtaggcctggcagggtggggcttactgggcagttggctgggatgcccctgaatgcccaggaggccagagcagcaaaaggtggccctgcagcggggaggctgtggcgctcacctgcaggcgtactccacagtgtagatggctccctggctctgctcctcccaacgctgcatgtctgcctgtagggggcgcaggagatatttggcaagggaggccacccccacctagagggccttcctcccagctctcttggttggggctctcctgagtcctcatggtggaagcagagacctttcctcctgcaactcccttccctcacaggtctgggctttctgtgaacacctggccaccatgcctcagggcctttgcacaggctgttccccctgcctggcacatccttcccttagatagtcagacggctgcctccttgccatgcaggtcataactgtaacagaatagtatagtttgactgtgtccccacccaaatctcaccttgaattgtagttcccataatccccatgtgttgtgagagggaccaggtggagacaactgaatcatagaggtggttcccctcatcctgttctcctgataagtgagttctcacgagatcttgtggttttaataaggggcctcccccttcactgggcactcatacttctccttcttgctgccatgtgaggaagtacatgtttgcttccccttctgccatgattctaagtttcctgaggcctccccagccctgttgaactgtgagtcaattaaacctctttataaattacccagtcttggctatgtcctgatagcagcatgagaatgaactaatacacacatcttgccatctccttcaaaatctatcccagatctgtccaccacgcctctgacctggctttgccaccacatgcctccttgctggtgtcccagccttgactcctgccctgacagcccctgctcctcccagcaggccccagctcaccttgtgctgggccagctcggggagggagcgacgcacatgctcctgcagccggtacagggccacggatggctcgttggccaggacgtagacgctctcagtgaacttgtccgtgactagatacaggtggtagggatggggcgggtgtggggagacaaagcgtcagcctcctcattgctcaagtgttgagcccagccagagcaaagggggcatctggcgtgtccctccgcagctaggtcactcctggcccatgacaggctggaggaagtggtcacagcagggctcactcaagaggacattaatgagaccgggtgcggtggctcacgcctgtaatcctagcactttggaggctgaggtgggcagatcacctgaggtcaggaattcaagaccagccaggccatcatggtaaaacccatctctactaaaaatacaaaaattagccaggcatgatggcgggcgcctgtagtcccagctattctggaggctgaggcaggagaaatcacttgaatctgggaggtggaggttgcagtgagctgacgtcatgccattgcactccagcctgggcaacaagagcaaaactccatctcaaaaaaaaaaaaagaggacattaatgagaggacataatgagtgatgagttcataacgagtaaacttcttttttttttttttgagacagagtcttgctctgtcatcaggctggagtgcagtggtgcaatctcggctcaccacaacctccgactccctggttcaagtgattctcctgcctcagcctcctgagtagctgggattacaggcatgcaccaccacgcccagctaatttttgtatttttagtggagacagggtttcaccatgttggtcaggatggtctcgatctcctgacctcgtgatccgctcaccatggcctcccaaagtgctgggattacaggcttgagccaccgcgcctggccagcttgattgaactttttttttagagacagggtctcgctctgttgcccaggctggagtgcagtggtgtgatcacagctcactgcaccctcgaaactcccagcctcaaggcatcatcacgcctcagcctcccgaggagctagaactacaggtgcaaaccaccatgcctggctagttttttcatttatttatttatttatttattattattttgagatggagtctcactctgtcgcccaggctggagtgtagtggggcaatcttggctcactgcaagctccacctcctgggttcacgtcattctcccggctcagcctcccgcgtagctgggactacaggcacccgccaccacgcccggctaactttttgtattttttagtagagacggggtttcactgtgttaccaggatggtctcgatctcctgacctcgtgatccgcctgcctcgggctccaaagtgctgggattacaggcatgagccaccgcgcccggctcattttttaaaatagagacaaggtcttgctatgtggcccaggctggtcctgaactcttggtctcaagtgatcctcctgcctcagcctcccaaagtgctgggattataggcatgagccactgtgcctggcccccagtgaactcttctcatctttccctcccaaacccaccggtagtggacactgctgcctactgcacttcccggcattctttttgcccccgtgaccacactcgggactcttcagagcatgcccacaggacctgaaagtgcctggaagttcacatcccaggagggcctcagctgccactcaccagtgagagatatggaaacctgtgtccctcgctgggcactgaacaacccagagcctaacatccccctgggctcctgtgcaggcccaggatgaggcctccctctgcagattttacctgaggtgcccctcgctcagcctcctcaccagccagccctgccctgtttccccttctcccctgcaggtgtctcctgatgaaattttttttttcttgtttttgagacagagtcttgctctgttgtccaggctggagtgcagtagtgtaatctcggctcactgcaacctccacctcccgggttcaggtgattctcctgcctcagcctcccgagtagctgggattacaggcacccgccaccacgcctggctaatttttgtatttttatttgagatggggttttaccatgttggccaggctggtctcgaactcctgacctcaagtgatctgcccacttcggcctcccagagtgctgggattacaggagtgagccaccgcccggccctgataaattaattgcacgcaaatcctcattacagggtctgtttcaacaacggcattcccagccagccagcagggcccgcctttcctgtcccattcttgggcagatcctgatggttccagtctcacctgttctattataccacactgcccgcaccggtccaggcacagcgaggcacggccatctcctgcctggatgccagatccaccttctccctggcctctctgcttcccctgctgccaacagttcaacctccatgcagcacgtgaggcaaactccaaatgaacaaatcatctattcccacccttgctttaaactcttccatagctcccacctgccagagaataaaatccgcctttcttgccctgcatgttctggctgctcttgacctccctgccttccttgccctccacccctggctcttccttggacctcccagcactgcccagaactttctcactgcccgagaggacaaggtaggaggatcacttgaggataagaatttgagaccaacgccgggtgcggtggctcacgcctgtaatcccagcactttggcaggaggatggattcagcctaggagttcaagaccagcctgggagacatggcgaaaccccacctctataaaaaattgcaaaaataagctggtcatggtgatctatacctgtagtcccagctactcaggaggctgaggtgggaggactgcttgggtctgacaagtggaggctgcagtgagccatgatcataccactgcactccagtctgggcaaaagagtgagactctgtcccaaaaaaaaaaaaattaaatgcccgtatgtgaccagttgctcctttattcattacagcagagctctaaacacttggtcacctcaaggcctttgcacttggtattcccacctggagacaccattccgtcactggctctccttcatccctcaggtctgctcaaatgtcacctcctgggcaagaccctccctgactaccaagcttaaaagatgacccctccacctcacggaggaccttggcaggcattttgttcctttctcttaataccaatttcaactgattaggttacatgttcacaggaaaagttaaaagcttggacttgggagagcagagcttctctgagcctcagcttcctcatccacaaaaaaagaataacagcaccagcctcaaagtttgctacagagatgaatccaatgccatcaccagggtgactgctcaggagagagaacccaggcgtgtctgggagtcaaaggaggctaacacaagtctctccatctcaccactgtgccttgagtggcagagcccagcctgccacctccaaactgtgtgacctcttaccagataggcctcctcgctttgaatgtgagcataacggccaggggcggtggcccacgcctgtaattccagaactttgggaggccgaagcgggaggatcacctgaggttgggagttcgacaccagcctgaccaacgtggagaaaccccgtttctactgaaaatacaaaattagccaggcatggtggtgcatgcctgtaatcccagctattcgggaggctgaggcaggagaaacacttgaacccgggaggcggaggttgccgtgagccatgatcacgccattgcactccagccttggcaacaagagcaaaactccgtctcaaataaaaaaaaagaagaagaaaggtgagcataacagacaaggcacggtggctcatgcctcatactcatgccctccgttatccatggttcccgaatctgtggattcaaccaaccgtggatggaaaataggaaaaaaaaaattccacaaagtttcaaaaagcaaaacttcaatctgccctacacgaagcacttctttgaatccatgtgaatgaagtgatgtgtaggcctgtattatgtattctagatgtgagtaatctagggtgatttaaagtataggggattagctgggtgcagtggttcacacctgtaatcccagcactttgggaggccaaggtgggtggatcactcgaggtcaggagttcgagactagcctgagcaacaaggtgaaaccccgtctctactaaaaatacaaaaaaattagctgggcatgggggtgtgtgcctgtaatcctagctactcagggggctgaggttgcagtgagctgagatccccccacggcactccagcctgggtgacagagcgagactccgtcaaaaaaaaaaaaaattaaagaattagcctgatgtggtggtgtgcacttgtagtcccagctactggagaagctgaggcaagaggatcgcccgcgccagagagatcgaggctacagtgagccatgatcgcgccaccgcaccccagcctgggcgacagtgtgataccttgtctcaaaaaaaaaaaaaaaaaaggaaacaagacgcacagcgattactacgccccggggattcttccaatgcattacaaatatcaggttgttgagttttttttttttagacagggtctcacttgtcacccaggctgggggtgcagtggcacgaccgtagcccactgcagtgcagccttgacctcccgggctcaagcaatcctcccaccttagccgcccaagtagctgggaccacaggcgtgcgccaccacgcccggctaatttttgtatttttttagagacgagatctcactatgtcacctaggctggtctcgggctcaagcgatcctcccgcctaggcctcccaaagtgctgggattacaaagccaccactcccagcctcagctactgaattcttgaaacaatcctggggggaccggtaattaaagcagacacggagcctttctacaggtttcaaaactagtcagcggcagagctgggattggacggcagttcaatcactgctcctcgcacggtccctccgcgcccggcctttgtcaggccgcccctccacaagttaccggccccctctgtcccgcccgcaggcccgcaccacctttcttccccttgagctgcatctccggctcctccatagcgaccgcggccgagcgaaccgggaaacggcaccggaagcccggaggttgggacgcccgcctaagccttccctgctgaaaccggacgccgcacggctcctgttccggtgtcagagggcccgccctccccgctcctcagtctttgcggacaagaaaggggctgtgtgagacgcagggaaggaggcacacccgggggtggcgcagtgaggagggggcgcgacggccaggaggctggtggagcgacacccaggcaggagagggggaagaactctctccctttctgaacccccttttccttgagagacgagttgggggagtcctccacgcattacccactcgggccgcaaaaactcccttctttagccctctgcccccgcccttgcttataagcctttgagaccgcagaagggaccttgttgtggaacgggacggccaaggtacgctgcccctttaagttccagacgccccgcgtacttcccctacttcttcttcttgagatagccccgcccatctacccgaagccggagccaattggctccctctggaaaaatctgtgggcagggtaaaggtgagcgggcgcaggcgtagtgaaattctcagagccctttaggccccgcccattccctccgagtcggtgaggaggggaaaagaaggcgcaggcgcaactgccctcccaggaccccagcggaacccacgccctcccctaagtcttaaagggccagaggcagcacttactgcccgggcccttcctcacttttggggggcgggggtgcgcaagcgcagtgggggagctctggggtgggggtagcggtcgagtatcaagttgctttctgtcccggcagaggaagccagatcgctgagggtccggtctccagtttgcctcctgctatatccattggaagagaaaagtttgtgacttgggcccccaagttttgagagaactgggctttcggcgcggggggacagaggaggctcgtggggaggtgagtggacctcctggatcgatttaggaggctcgggtgggactgggaccaatcgcacctttgttgagccgtcactcattatggggagcccctcccaacaaccatagcgaatatttattgagctccacgcttagcagatcccccgataagctatgtacagacataattcgttgtaggtctcatttccacattttgtcgtggaggaaactgaggctcaaaggttaagtcacgtgcccaagttctcacggcctataaattgagggattcgaacccagacagctgaccccagagccccggcttttttttcctttcttttttttttttttttttttttttgagacagagtcttgctctgtcgccccagctacagtgcagtggtgcgatctctgctcaccgcaacctccacctcccgagttcaagcaattctgcctcagcctcccgagtagctgggatcacaggcgcccgccaccgcgcttggctaatttttgtatttttagtacagatggggtttcaccatggtggccagcctggtctcgaactcctgacctcatgatccaccctcctcggcctcccaaagtgctgggattacagccgtgagccactgtgccctgccagagcccaggctcttaaacattgcacattgtaggtgctttggtggtggggaatggtagacctcgaaagcagttggactctggttttcatttccctggctctggtaattaacctggacctcagtttacccaccctcacagtgcaaggctaggtatgcagtcggtgcctactttattataactgttgataattattgtcatctctccccttctgacacctccgccagctttccccatggagcttacccagcctgcagaagacctcatccagacccagcagacccctgcctcagaacttggggaccctgaagaccccggagaggaggctgcagatggctcagacactgtggtcctcagtctctttccctgcacccctgagcctgtgaatcctgaaccggatgccagtgtttcctctccacagggtaggatacctcctctgggattagccctctgggattccatgatgatggaatgtcaggcctcacatggaacctgtgtcttgctttcgtttttgttttgttttgttttgttgttttttgagatggagttttgctcttgttgcccatgctggagtgcaatggcgtgatctcagctcactgcaacctctgcctcctgggttcaactgattctcctgtctcagcctcctgagtagctgggattacaggcttccgccactacgcccagctaattttttgggtatttttagtagagacggggtttcaccatgttggccaggctggtcttgaactcctgacctcaggtgatccgcccacctcggcctcccaaagtgctgggattacaggcatgagccactgtgcccggcctgtttttgttttttgatacagggtctcgctctgttactaaggctggagtgcagtgatgcaatcatagttcactgcagcctcaacttcctgggctgaagccatcactcagcctccctaggagctgggactataggcatgcaaccacacctggctaattttttttttttttttgggaggctggtctccacctcctgggctcaagtgatctgcaggcctccacttccgaaagtgctgggattacaggtgtgagccacagtgcccggcccttcacacctgtttttaactctttgagggtagatagctaggagtgaaattactgggtcagatggtcatcctgttttacttactgaggaactgaggatttatttttgattggagtccaagaatatgcctaatttagttccctcccacgacctttgttgctgccactcctgtctggaatgctcttcctacacttcttcctatagctgactcccctcccctccctcccttcccgcctccgttttttttttctttctttctttctttttttgagatggagtctcgctctgtcgcccaggctggagtgcatggagtgcagtggcgcaatcttggctcactgcaagctccacctcccgtgttcacgccattctcctgcttcagcctcccgagtagctgggactacagtccgtttttttttttttttttaaatggaggtttgcttttgttgcccaggctccctcccctcccctcgcctcccctcccctcctttcccctctccccactctcgagacgcctcctggatcccctctcttcttgagacagaatcttgctctgttgtccagggtggagtgcagtggcactatcttgactcactgcaactccctctcctgggttaaggtgattctcctgcctcagcctcccaagtagctggcatgcaccaccacatccagctaatttttgtgtttttagtagagatggagttttgccatgttgcccaggctggtctcgaactcctgacctcaggtgattgcccgcctcggcctcccaaagtgctgggattacaggcgtgagccaccgcgcccagtccctgtagcggatttctttgacttcctaagatctcggtggtgtcaccttggggaggccctcctgttaccaccttgtctaagaaggacttattccttgtgctccgttcttttcatcctcttctacctgcttttaaatttttttttttttttttttttttgagatggagtctcactcttgttgcccaggctggagtgcagtggcgtgatctctctcactgcaacctccacctcctggattcaagcgattctcctgcctcagcctcccgagtagctgggattacaggcatctgccaccatgcatggctaattttgtgtttttagtagaggtggaatttcaccatgttagtcaggctggtctcaaactcctgacctcaggtgatccacccacctcagcctcccaaagtgctgggattacaggcatgagccactgtgcccggccttaagttcttttgaacacttatttcaacttgaagttttttattatttctctatgtctgatgcacctacttgacccccgactccctagagggcaaaaactatgtcttgtttgctcagaacattgccaggcagggaggagaaagatgcaccctgggtattcaagagagtagagtgagtgaatggtggagtcccaggcactgcctttggtagctccaagaccccagggagataccgaaggcagtagcatggtagctcatgcctgtaatcccagcactttgggaggccacggcaggagaattgcttgagcccaggagtttgagaccagcctgggcgacagagcaagactccatctctaccaatatatatatatttttaatttgctgggtatggtggcacctgtagtttcagctgctcaggaggctgaggtgggaggttggcttgagcccaggaggttgaggctgaagtgaactgtgatcacaccaccgcactccagcctggacaacagagcaagactctgtctcaaaaaaaaaaaaaaccccaatagctgggtgtggtggctcatgcctataatcccagcactttgggaggctgaggcaggtggatgatttgaggtcaggagtttgaaattagcctggccaacatagcgaaaccccgtctctacttaaaatacaaaaattagccaggtgtggtggtgggcgcctatgatcccagctactcgggaggctgaggcacaagaatcgcttgaacccaggaggcagaggttgcagtgagccgagatcacgccactgtactccagcctgggggacagacggagactccatctcaaacaacaacagcaacaaaaaaaaacagatgggcttctgtcctgaagcctcagagacatctactgaggggaaactgacgcctgttgtctgtttcccagcaggcagctccctgaagcactccaccactctcaccaaccggcagcgagggaacgaggtgtcagctctgccggccaccctagactgtgagtgggcccacggtccccaacaaggagaggagtaggagggtgggagggcctgtgaggagcaatcgtggacagagggtaaactgaggcacagagaagcaaggggatgagtgaggactctgcctctgtcctgccccagccctgtccatccaccagctcgcagcacagggggagctggaccagctgaaggagcatttgcggaaaggtgcgtgtccacacacatgtgctggcatgtctgcacctggctggtgtgtgcatatgggtgtccatacccactcatgacgtgacctgtgagtgtccacgtgtatgattgtatctaactgtgtgtgtgaccgtgttcatgtatgtccatcaacatacgctccccctcattcccctgtctaaccccagccccccacctcgtccccatttggcagcactggggatagggggcaggggtgcagcctggtggtattgcccgcctcctcctgccaggtgacaacctcgtcaacaagccagacgagcgcggcttcacccccctcatctgggcctccgcctttggagagattgagaccgttcgcttcctgctggagtgggtgcgtcccagcccagctgggcagctggggggttcccgggggccttagggtgggctggggttttggctgtgtctgctggcgccttgtctttgagatgcggctgctggctgggtgcagtggctcatgcctgtaatcccagcactttgggaggccgaggcgggtggatcacttgaggtcaggagttcaagaccagcccggccaacatgggtgaaaccctgtctctactaaaaaaatacaaaaattagccaggcgtcgtggtgggtgcctgtaatcccaggtactctggaggctgaggtgggagaactgtgtgaacctgggaggcggaggtagcagtgagccgagattgcgccactgcactccagcctgggcaacagagcaagactctatctccaaaaaaaaaaaaaaagatgcggctgctgtgggtaccccaggattcctggttatgccccaatccatcctaccactgtcccttcttctccctgcagggtgccgacccccacatcctggcaaaagagcgagagagcgccctgtcgctggccagcacaggcggctacacagacattgtggggctgctgctggagcgtgacgtggacatcaacatctatgattgggtgagggactgcccatccccaggacctctcagcctcctggccttcattcctgcctcaaatgttcacagagtacttgaaaggtgcaggcctgctctaggtgccgagaacacgagacagccccattcccagcctcacagagcagagctccccatgcagggaaggcagacatggaaacaggcagctgagatgcagtgaactgcgctgcgatggcagatgcacaggtggctacaagagccccatgtgggcaagggaaatcagagaggtcttcctggaggaaggtgtctaagcttgagaccccagaaagtgagatgggcccagtgatgagcaggaggaaccacgttcaactggaggccagagagtacaaggcattttgagaatgaggaagaggtaaacctttggtttctcctgcccctacccacgacagaatggagggacgccactgctgtacgctgtgcgcgggaaccacgtgaaatgcgttgaggccttgctgggtgagtgggagtcgggagtggccctgggggccccagcactccagcgggccctgcgggaatcctgagggcagggagacgcccaagtgttgcttgaagagttcttggagcaggtagtccctgcctgctcttctcggaggatggatcagaggggaggaggtggtaggaccacacgggagtcggggtctgggtttaggatctggccaagaggctaagcacctccatcctccatggttcagagacccttcagccacgttcttcagtggagaccaagatagcagaggttggacccttgtcaaaggccacatgggcaacgggcagacccacggctgcattgtggggaatgaggggtgccatgggatctcccaggtccccagaccccattctggactcccaggccccaccctccagcgccctcccctctcctttgcagcccgaggcgctgacctcaccaccgaagccgactctggctacaccccgatggaccttgccgtggccctgggataccggaaaggtcagcctgagacacacagagcaggggtggggtcccttccataggcagggtgaccataaaggggtacatgggacaccccttcagtggtcatacgccggcagcgagagtgtgttgacaggtgttgagcactgctgtgtatcccgcctgggaacatcccagtcctggctcctggggctccacatgtgctggggtagggaggacaatgggtgtcagtggctgtggccatgatgggggacacataggcatgagaggccgaaagaggggcctctcatcaaagagccccaaagtggccaacagaagtcagagaggcttcctggaggaaggtgtcttaaggttgagaccccgagaagtgaggtgggcccagccctgggatggggaggtcagggaaggattctgggggacctgaagggagggagaatggcatccaggtgggaggagtggcccctgcggaggcctggcagtgaggacaccaaggggtaggcgaccaggccatagtgcacagagccacagaggccatccctctccgtggcgggcagtgggtttgaacaggggccataggcagaccccagtttgactccattttctctgtcacaatgggaccccaacttccccatccataaaatggggagatcccaattgaaccgaccccctggggtcatggtagagatggggtgcttaggaaatatccccctccttccttcagagttttactgtgtttgggacagaaatcattcctcttccctcctcatgttttcggggggtttgtttttttgttcgaggcagaaagtcttgctctatcacccaggctggaatgaagtggtgcaggcacagcttactgcagcctcgatctcccaggctcaagtgatcctcccaccacagcctcccgagtagctgggaccacaggcattcgtcaccatgcctggctaattttttgttgttgctttttttttttttttttttggacatggagtctcgcgctgtcacccaggctggagtgcaatggcgccatctcggctcactgcaacttccacctcccaggttcaagcgattctcctgcctcagcctcctgagtagctgggaccacaggtgcacaccatgacgcccggctaatttttatatttttagtagagacggggtttcaccatgttggtcaggctggtcttgaactcctgaccttgtgatccgcctgtgttggcctcccaaagtgctgggattacaggtgtgagccaccacgcctggctgtgttgttgtttttttagaagagacagggtctcgctatgttgcccaggctggtctcaaactcctgggctcaagtgatccttcttccccagcctcctgagtagctgggactacaggcatgtaccactctacccagctaatttttaaaatcttttttatttattttttgagacagagtctcgctctgtcacccaggctggagtgcagtggcacaatctcggctcactgcaacctctgcctcccaggcaaacaattctcctgcctcagcctcctgaatagctgggattacaagtgcctgccaccacacctggctaatttttttttttttttttttttttttttgagatggagtttcgctcttgttgcccaggctggagtgctatggcgtgatctcggctcactgcaacttccgcctcccaggttcaagcaattctcctgcctcagcctcccaagtagctgggattacaggcatgcaccaccatgcccaactaattttttgcatttttagtagagtcagggtttctccatgttggtcaggtgatctcaaactcccgacctcaggtgatccacccgcctcagcttcccaaagtgctgggattacaggcatgagccaccacacccggctgcacctggctaatttttgtagttttagtagagatggggtttcatcatgttggtcaggctggcctttcctgacttcaagtgatccacctaccttggcctcccaaagtgctaggattacaggtgtgagccaccaagcccagcctaatttttaaatttttttggtagagacagcgttttgctctgttgcccaagctggcctcaaattcctgagctcaagcagtcctccccactggacctcccaaagtgctgggattataggtgtgagccaccatgcccaggctcatcttttcatgaaagtcacaattcacacattttgcttggtaggaaatatttttatattaattctgaaaagctacaaaagtgcatttttacaaacttaggggaagttgaggttcctggggtgagtcctcggttctcccagctttgctctgtaatgcaggtctctgcaagggtccctgtttgtcccctaaggggagagcgcaggttggcctgtgcctccaccccactcccgattcaagctcacagcccaccttttccctgccccatctcagtgcaacaggtgatcgagaaccacatcctcaagctcttccagagcaacctggtgcccgctgaccctgagtgaaggccgcctgccggggactcagacactcagggaacaaaatggtcagccagagctggggaaacccagaactgacttcaaaggcagcttctggacaggtggtgggaggggacccttcccaagaggaaccaataaaccttctgtgcagaatgagggactttgctgtgcttcccggagggcttcctggaggagacagcccctagaggtctcacaccttctccccaagcacccgcaggtggtagatgaccacacggccaaaaaagtcagtggcatcctcaaacgtcaccttcagccggtccacttcagcagctggtatggggaaagtgtgagcgtgggcagtcaagggaaactggtgatttctggtttcccacccgcaggcccccaccccttccagacccagctcacactccaccgatgtgggcaacctggggaagctgcaggtccctctaagcctctcacacagaacaggtggtcatcagcaccattttacagaaaaagtggagtcctagaggtcacgtgttcaagatcacacatcagggttcccattcgggtttgggtgagtccaaagcttccagaggcacagaccacccaccccagaagcaggggcaggatatctgaagcgagttgttgtcctcagggtagaaatctacaatcttgtggagagcctgagtgccctgtgaaccttcagcagagaaaggcaatgagtgtctggggtgacccctggaacccctgccacccagggccttctagtaccttccaggcagccccggcgactggagaagccaccctgaaactggatctgcagctgggagacacggatgagctggggaaactccagcgtcacccactgggaggggccctggaagcagacagggaaactgaggcgcaagctcactgcaggcacagagccctgctatgcctgtctcattcacatagttcttggaatggaggggaagaaggaaattcggcacatgttcctttcctggccacccatgagggccccctgacgttctcaaggcatgagatctgaatctgaatcaccctagagatggagggtcgagggaggcgcctcacctggtctgagttccaacatgtctcctcatcctggtcgaaaagatgtttttttccaaactgccgagtgttgcgattcagcactgaactcaccctggaggcaccaggatcaaggcgaagagaggggctgagaccagctctcagctccgcggagggcctgacccccagatctgtccactgagggctcgaccccaggcttagggcctcgccactgcctgtccccacagactcttacctgctcactgtctctggacaaaccaaagagtgggtcatgtcggttccacaagacctcgcagggcttaggattgggcacagccttggttcgaatcccggcgcctcctcaagctacagggcggcgcgatcttggctacgccttggcctgaacgtcctcacctgtaacttgggacgagaaccgccactccctcgcccaccccagtcctaaatgtcgcctcgatcaatcccctgccggaaaatttgggagagaggatcagggaaaccgccaatgcccggaggccaggcctttcacaggaaacagatttcccgcgggtttcgggggcggtggctttttgtgcgaggctgtttctctgcgaatagctcttggagccaaatcttgggacccggaaccgcgtgggcttggcgcatgcgtgttgtaattcaggcgccgaccgcggacgctccagaggtggggtttggttcgaccccgccccttcatgctcgcttcttaaagggcccgggttcgatgattgaatttaccttggttcccttgaagctgtagggaaaaggctggctgcgcgcacggggcgctgtccctcggcgcccgaaggtgtagagcactgattttgactgattttggaatccgaaagacttcctttttttttttttttttttgaggcggagtctcactgtcgcccaggctggagtgcagtggcacgatctccgctcactgcaagctccgccccctgggttcacgccgttctcctgcctcagcctcccaagtagctgggaatacaggcgcccgccaccacgcccggctaatttttcgtatatttagtagagacggggtttcaccgtgttagccagaatggtcttgatctcctgacctcgtgatccagccgccggggcttccaaagtgctgggattacaggcttgagccaccgcgcccggcctttttttttttttttttttgaagtggggtctcactgtcacccaggctggagtacaatggtgggatcgcggctctctgcgacctctgcctcccaggctccagcaatcctcctacccagcttcccgaatagttggaactagtaggcgcgcgccaccacggcaggctattttgtttgtttgtttgtttgtttgttttttggtagagatgaggtttcgccatgttgcccagattggtctcgaactcctgggctcaagtgatccgcccacctcagcctcccaaagtgctgggattacaggcgtaagccaccgcgcccggccagagagacttcctatgacaatgtctttcttcctactctaacctactctaccctaacggctaccctaacctactctaacctactctaccctaaccactaaatgcagcctgggaatccccgaacttcactgcctcccggaggccaaaggcagagttgtggaaaaggccacgatgttgggagtatctgaagtcctcatcaaccctttttgttcttgttgggacagaggagccctggcctccaagtttgtctttcccagaaaatgctgctgggacgtcaaggaaggcttcttggaggagggagcatgcgaggtcgggtgttttttgttgtttctgttttgttttgtttcgagacggagcctcactttgttgcccaggctggagtgcagtggtgtgatctcagctcactgcaacctccgcctcccaggttcaagtgattcccctgcctcagcctcctgagtagctgtgactacaggtgcgcaccactatgcctggctaatttttgtatttttagtagagatggggtttcgctatcttggccaggctggtctcgaactcctaacctcgtgatctgcccgccttggcctcccaaagtgctgggattacaggtgtgagccaccgcacccaggctgtgaggtgggttttgaagcatgaacaggagtttgccaaacaaagcctcagataccaagctgaagatttggttcactgattcactagacacctcctgcaagctctactgtcacactgtcatgtccagccttctgctggatgatgctggggacagcaagaggcctcagctccaggcctgtcccagaggagcccctgatctgggcaagacagaggtagacatagacactcctagccccaagggagagatggggccggaggagcaggggctctacctggaggaagggcttcctgggaaaggggatgttagaactgcaccttaatagggggtcaggcgccaggaattcacaagggtgagaaaatctggagtggggagggtgtcccaggcagggagcttagcataagccaaggcctagttgggtgaaagaccatgaatttgaataaaatatgtggagccacatcctgctgggcccggagcagtcatggaaggtgttggagaaagggcaggacaccatccgttctgcatgaatggagggttccaagacagagcagccactggcaagaggctgttgttcctggctttagctgaatggtctggcagccagcccctttcttcaagggctggaggaatggtccttccggcatcctactagtgtctgctcaaacccaccccaggcagcaggggtgggggctggcggggaaactgggtcaccagcagaaggcctgtctcttcagcccctgcctgccagggctttccgcatttagacagagtctggtgccatccaaacccaacttcgctggtctcagggctggggctggaggtgacaggaaactgtgcccccaacctcacccccggaaggaagttagaaagagcaaggacactggagagcccagatctggttcaaatcctggctggaccactcattggctgtgtgaccttagaaaagcaccttgacctctctgagcctcagtttctcatctgtgaaatggggggaattctattaacggcactgttggaggactctctgggttcttcaggttgacacatagtaacagtagctgactttcactgagagtccaccgtgtgtctgacttgaagccatgttctgtcgccacccattggctcgttaaacctgctgtggctggtccctgtcattcccattttatagctgaggacacatcaacttagccaagtccccccagtgaggatatgcatggctccagggctctccacaccactcctggctttggcatgcggcctccttgcccacgggtatgaggccagctccataccctcttcccgcctcctcaccccactggcgcctgggcatgaaagagcctcctgtttctccagggaattagcagctctgggctcccagcagggcagccaaaagtggtccattcattcgcttgagtgaggaaagactaagagctcccacccccaccccagggaatggggcagggagggctctagaaggtccaaaagcagctcctctggttcacttggggaaactgaggcacagaaaagcaaagtcatttggccaagatcaccaaggggaactgggatgcaaaccccagtctcactctggagttcccctaactgggcttgggttagcatttttctggggagaaattggaggtttagagagagtcagggacttgctggcagtcacacagcaagtttgggtcagtggggactctctgccttggtggtgtctggggaggcagccccacccatgcagaaaacaggtccttctgtccatgatttcattatcctggaacaaggcagggaatggccctcagatagcttcaagcctcagtttccccactgggagatggatgtaaccttttccctaaggtcttagcctggggcatctgcaagggagggtttgatgggattccctgagcctggagacccccatccggcaggtctgggtctgatttatctaccggagcccatcaggacccctctccgaggagacagatgttcacacagtagcagctggggttatgagtcctggtgcagtgcaagcctgggtcccactggaggtgacagtgggagtgggaggggtgtctgggtgtgaaaggattcaggtgggtgtgtatgggagcaccaggagctgcgtgtgtgtggctgttgtaacagtggctgggagggctacagatctcggggttggtggcattggtggtgttggtgtgaacatggttgtgtgctcactacctgtgggtgtgtctgtgactagaaacctggttgggtgtgagcaatgtggggccaacgtaggctctttgctgctggcaggaaggcgaaggtgttgtgggtgtgagcagcagtgggtgtgtttgcatgtggagggacactggtgcagcccagctcatagctttgccttcggttgtggagcaagtgtgacttgtgtgtggcccaggccaggtatggttgtgtgtggcctgaccaggttgattgtgtatgtgattgtgtgtggcccattgtggctgtgcatggctgggtgtggttgtgcatggctgggtgtggttgtgtacggctgggtgtagttgtgcatggctggatgtcgttgtacatggctgagtgtggttgtgtatggctgggtgtggttgtgcatggctgggtgtggttgtacatggctgagtgtggttgtgtatggctgggtgtggttgtgcacgaccaagtgtgattgtgtgtggctgagtgtgattgtatatggccaggtttgcctgtgcatggttggtgaaacctgtgtgtggcccggtgtggttgtgcatgactgggtgtggttgtgtatggctgagtgtggttgtatatggctgggtgtggttgtgtatggctgagtgtggttttatatggctgggtgtggttgtgtatggctggatgtggttgtcattggctgggtgtggttgtgcatggctgggtgtagttgtgcatggctgggtgtggcgtgtatggctgggtgtggttgtgcatggctgggtgtggttgtgtatggctgggtgtggtgtgtatggctgggtgtggttgtacatgaccaggtatgattgtgtatggctgggtgtcattgtgtatggtcaggtttggtcatgtgtggtgggtgagacctgtgtgtggccaggtgaggttgcatgtgagccacctgtgctgttagtgtggctggggtgtggctggggtgtgactgtgtgtgtcagtggttgttggtggcattgtgtgtgacttacccatgtgtcaccttgggcatgttcagaggcactttggaggcactgtccacccctgagacccagctctcttggagggtccagcctccctccccacctctgctctggtctgccagtaccatcccccacccctcccccactggcagcagcccctggcccagggccccagtggggtggtggggacagagaaggcactcagggctggggaggggtgcccaatcccagctcaggcctataaatagctctttgagcccagtagattcccaggcaaggttgcctcattcaagcccccggcaacagcccgcccctgggccccaggccagcccctctaagctcagccctggcaccagcgaggagccggggggtgggggcaaggggtggggaggagtggagaagcgggggaagcagaaggatgaggataggtggggttggggctcagctctgcgcccacagaccttggcttccacctggtctctactcactctgtacatcctcgggcaggtgatcctagctccttaagcctcagtttccccagcacctgtaaaataaacagcagtccctgcctgtgtgtttacttcccatttcattctccaagcaaccggtaacgtagggacattcattatcccccattttatttatttatttatttaattttttcccaagatggaatctcactcagtcacccaggctggaatgcagtggtgccatcttggctcactgcaacctccacctcctgggttcaagcgattgtcctacctcagcctcctgagtagctgggattacaggtgtgcaccaccccacccagctaattttgaattttagtagagacgggatttcaccatgttggccaggctggtctcaaattctgacctcatgatccatctgccttggcctcccaaagtgctgagattacagccttgagccaccgcgcccaccctccccccattttattttattcatttttgaaatagggtctcactgtgtcacccagaccagagtacagtgatgcaatcttgactcactgcagctttaatctcctgggctccagcgatccttccccctcagcctcccgagtagccgggaccacagatgtgtgccaccatgtcctgctaacttttaagttattttttgtagagatgggggtctcactgtgttgctcaggctggtcttgaactcctgggctcaagtgatcctcctgcctctgactcccaaagtgctgggattacaggcatgagccaccggcacctggactatccccatttcagatggggaaactgagacacagaaagatgagatggctcactcagagtcacattgttacgaatggcagggagggggtttgaaccccagacttgtggaggctgagctactcggttctcacgcacgtcacgcagctgttctcagcgtctttcccagtgtgagccacagccaaccccccagcacgctccagcctcaccgactagtcattgcatgctgtttgggtgctgctgacacagctgtcacctgcagacactcacatcagctgggatccttgacctccatctctcctctgtgacacagagtcaaacagtcagtgcagcttcccgctgtatcatcttggaccccagggctaccccttgctcacctggggtccccccttatccctcattcattcctaccctttctttgataatctttttttttttttttgagatggaatcttgctctgacacccaggctggagtgcagtggcacagtctcggttcactgcacgctccgcctcccaggttcaagtgattctcctgcctcagcctcctgagtatctgggattataggtgaacaccaccatgcctggctaatttttgtatttttagtacagacagggtttcaccatgttggctgggctgggctggtctcaaactcctgaccttaggtgatctgcctgcttcagcctcccaaagtgttgggattacaggcatgagccacggtgcttggcctcctttcttcttcttttttctttttttgatggagtctcactctgttgcccaggctggaatgcagtggcccaatttcggctcactgcaacttgcgcctccagggttcaagcgattctcctgcctcagcctcccgagtagctgggattacaggcgtccgccaccacaccctaattttgatttattagagatggggtttcaccatgttggctaggctggtctcgaactcctgacctcaaatgatctgtcctcttggcctcccaaagcgctgggattatgggcgtgagccacggcacctggccaaggcctcctttctttgataaccttgtggaagctatcttgtccctcatttgcctatcctcctaccagatggacacgcaccctcagagatgctaaacacacactcacagatataggacccagggtggagcgctgcgagcccattctcagcacagaaacaccacgaccataggaaggaaggcaggggcaaagcctgccctctctgggcacatttccctcctcatggcttttttttttttttttttttttttgagacggagtctcactctgtcactcaggctggagtgcaatggcatggtctcagctcactgcaacctctgcctcctgggttcaagcgattctcctgcctcagcctcctgagcagctgggattacaggtgtctgccaacacgcctggctaatttttgtatttttaatagggaaagggtttcaccatgttggccaggctggtcttaaactcctgacctcaggtgatccacccgccttggcctcccaaagtgctgggattacaggtgtgagccaccgaacccagccctcattaccatatttttaatggtggtcaaatacagataacataaaactcaccatcttaaaatgtgtaattcaaggccatgcgcggtggctcatgcctgtaatcccagcattttgggatgctgaggcgggcggatcatttgaggccaggagatcgagaccagcctagctgacatggtgaaaccacatctctactaaaaatacaaaaattaactgggtgtggtggcaggtgcctgtaatcccagctattcaggaggctgaggcaggagaatcgcttgaacctgggaggtggaggttgcagtgagccaacatcgtgccactgtactccagcctggatgacggagcaagactccgtctgaaaaaaaaaaaaaaagattggggtctcatgtctcatggcagggacatgcctatgcctctgcataaagcaaaattattcatgtgtcaacagcagtacccagtccatagagtgtgctacataaatgctgatcagacaaaggtgaatgaatgaatgatacaatctggctgtagttgctggaaacagctcgggggtgtcacacacctggactcccaccctgcgtgcctcttaccagctgtgtgaacaaggagtctccccgtctcgtccgtgcctcagtttcctctctgtaaatggggtaaaccagtaattgtagccaaaactgctttgaacgtgagtcctggagaatcaggcagggcgaggttcgaatcccagctctgcctctgtgcgtgaccttgggaagcgactttgcctccttggggctcagtttccccacctgtaaaatgggacggcctcatcctggggcataatggggacgtttaacgcggttcctggggcaaagagaatgggaggagaatcgatgccatcttctcctgggtgcggtgagtgtccaaaaaatgggcggggtggggattttaggcaggggagccccctccctcgcgcagccagaggcctcgggctggcgggggcgcatgcgcagagagccctcgcggcccctttataagcactgaggcggcgctggggccagcggagcgcagggcgcaggggctggacccggcgcggagctggctgagtcggagcgcagcgtcctttgtgcccggcggccgccccgggatgcgtccgagctaggagccaggtgggggatccgtgagggggccgtgttgcgggagaagacttcgggattagagacagagctcaggattagggagaggacctgagaccagggagaagtccccagaatggggagggggctgaagcgggggaggggagccctaggttgaggagggagcgcgaactgggagggggcttgggaatgctaggtgaacagacatttggggaggaaggttgtccgcggaatccggagactaccccccggtggggagggggccgggctgggggtgggtctcagggttgaggagggagcaatgggaaacagggctaggggaggggccccccgagtttggagggaagaagaggacacccagatgccgaatgggggactctggaacagggcacccccgtatctcagccgagacaccccaggattttaagtagggattcccaatttgcggttgaatggaggattccgggccggactgcagtggggagggggcccccagatcaccctgtgcccaatggaagggtatctgcgctgagagcgaacggccatggggaaggggctccctgccatctccctgtccttttgggtcaggtccggtcaccacgttctgactcagggaggaggtcctgggggtccccatcccaacgtggttccccgttattcccttagaccttgggttgaggtgttgtcccttatcccagggaacacactgggtgtcccaggtgaatgttgggtgggggtcccctagaccccccagctatggatccccaggacctgtgagggataccagctcagagggggggctgtcccccagcaccttcacagcctcccacgtccttacagcatgacacagacccctacccccaccccctttagttccacctgtccatatggacacatgtggaagcgctggcttggtttgggggcacaggggctgggaagtaaggggctgggaagtaagggccctgtctgggcaggagagacccccatccctacgcgtggggctttgttcctctcaggcagcatcaatgagaaacagccaggccagggagagggttggctctgggccccagcgggggacgtgggggcagggcaggcaggaaggggtgggtgcactgtgggaccccagaacccagccgtcgcaatagctgatggacattctgaaatcaagttccccctcaaggatatgggggttttgtgtgtgtgtccaccccagacaggcagggagggggagtatgcccaggggttctagggtcccctgtgagtctgatgtgactgtggttgtgtctttgtcagaaaacttgtgccgagggccacatcaccatgtggcaaaatgatgggtgtccatcggtcaccaaggccacaattatccatctcggtttgtgccaggggctggcatcgccgtgtgagtgaggagctatgtctgatgctgttccgttcatcaaggggtttatgtgggggggggggggcccgagactgtgggtgtgtgtctttgtgcagaagacacgccgcctgtcttgtaagtgcccatattgtctctctttgttaatgtcactgtgaatctgtgtgagtgtgtgtttccccagggtctgtgtctggggtgcgtggctgtgtgtgtcccgcttgtgtatctggaggggccaagggttctttccatgcggttggcagtgtgcacccttggcacgggggtgtgggacgtggtctgtgttcagagttggggcgctaacagggaaagcttgagcaggggttgaaatccccaaggggaagcccgggatgatgactgagcccatctccctttctcctccacggagttccacattcacacccatgcacactaatacaccctgactctcaggtcagaaacacacacatgtgcgcacagccccctgctgagggtcactcagactcacacacatccacagatcacactaggtcccatgtgctccacccggtgcacggagctgctgcaggctcacacacacaacatgcacccaccacatggcacaaccgccttcacacccttgccaggacacaacaccccggacacacacccagtcacaaacactcacaaatgcccattggcaaactcaccttcactcagtgctaacggagacttgaggtgggggtgaagtgaaggaggggacacacacacacttacacacacacactcacacacactctctcacacacacacattcacatggatccgagctgcccctcctccagcaccccgcaggcccctgcttgcatatgcatgaggcttgtacattattcatgagggcacgggccccagacagctgtgtaaatgctcatctctggccgccctggggaggaggtattttaagagaagggtgtgggtgtgtgagggtgcgagtggaagggagtgggagggtgtgtgtggggggtgtgcacctgaaactgtgtctgtcaccatgttgggcaacctcagtatatttttagcgtatacatgaggctttgtgtctaaagagctgtttttaaatttaacatttctaggactttgcaagtcttaggtcatttcatcctcacagtagctgcaggtggtacttgctggataatctccattttacaggtggggaaactgaggcacagagagattgaagcagcttgtcccggattagaagcagagctatctggatgtagtctgacctgttaacggggtgtgtgtgtgtgtgtgtgtgtgtgtgtgtgtgtgtgagagagagagagaaagagaattctctggccttgtcctctcgtaaggccctgctgggggcaggtgcaacccggagtcctgtctctctctaatacctggccaggcctggaacagccatgaggggaccccacacttgctcagggttccaaggggaagaaatgagaacagcctggtgaaggcagaggttgctgaggtttacaagttggtagttgggagcactggtccagggtctggctttgacctctaccctgctgtgcagcctgaggcaaacctctagccctctctggtccctgaggcatcgtgttagcaggcaggaggcaggggtggactaggtgggctttgccgctgcgttgccgcctcagagttcagcaccacggacaggtcccaggccggcctcccagcaggggactctgggagctgggaaggagaactggggaaagggacagctgtcacatacagcctccccttctggactccgttcacaccccttcctcagggataatttcttatgggggcggggagcaaggattgggtttgcagatgatgttctaattttccatctgcgcccacctcctgagccctggtgaccggggttcgcaggagtgggaggttttggggagggaccacctccccaggattcctagtctctggaacaatgtgaagtcaggaaatgcactgctgtgtcccaacgactggcatgggctttgctcacagtaggcgcttaataattgtccactttatccctatgggtcctagcccctatagggaaatggacccacaactgaagtttctctgtgggcctaagaagtatctttgttgagctgtgtgaagtcaggaggaggatgggtgggcaggggtgagccccttcctccagctgggagttggcggctcctccaaaatcccagaaaccaagaatagaatcttggtgacaaccaaatcctggaattgaagctgcgaatcgtgtcagccagcaaacccagattaaaggatggcttagaggccagcctgctgcctggactgaggatgctgggaggactgggacagactgctgccctctaggagccgccagtctgatggaggaggctgacttgaaaaatggtatttcagtcttggctgtgttaaggtcggtaataataatagcagcagctaaaatgtaccccttactgcatgagacagttctaagcattttatatgtattgactcatccattcctttcaactacctgatgttatccccatctgacccacaaagaaagtaaggcacagagaaggtaagcaacttgcccaagatcacacaaaaggaacagtgagccaattccagatttgattcactaccagcacccaggcttctgaccacagacttcattgcttggattgttttttgttgttgtgttgtgttttgttttgttttcagtctcgcgctgtcacccaggctggagtgtggtggtggaatcatagctcactgcagccttgaactcctgggctcaagcaatcctcccacctcagcctcctgcatagctgggaccacaggtgtgcgccaccaagcccagataattttttttttttttgagacagagtctcaccctgtcgcccaggctggagtgcagtggcgtgatctcggctcactgcaacctccacctcccgggttcaagtaattctcctgcctcagcctcctgagtagctgggattacaggcgcctgccaccacgcccagctaatttttgtatttttagtagagacggggtttcaccatgttggtaaggctggtctcgaacccctgacctcgtgatccaccctcctcggcctcccaaagtgctaggattacaggcgtgagccaccacgcctggctgctaattttttaaatagaggtaagatctcactatgttgcccaggctggtctcaagcttctggcctcaagcagtcctcccacctcagcctcccaaagtgctggaactataggcgtgagccaccgcgtccagccactgctattctgaggtcaagtggccctgggttcgaattctggctcagccctttgctggctccttctgtgacctagaataacacactggtctctctgagccctggtttcctgatctgtagagtgggggagtttggtcctgcaatgctgaatatctgggagggttgggctgtggctcacccctccctccctctccattttgttccagatccaggatgggggccccgtttgtctgggccttgggccttttgatgctgcagatgctgctctttgtggctggggaacagggtgagttggtttgtggggagggagagattggggtctaggggatggacaagatggggcagcttttgaattccagagccttctcctgctggtctcctggcatgggctagagaataaaatgagaatagattttaaaaggtctttgaacagtcaaaagcgaacaggatacctaagaggttatttttagtcattgtcagcagaagctggagattcccgcctctcatcgttttgctcagatgaactggagagaaagaaagaaagaaatgagaatagtgcagagattgattagtgatgtctgccaagggtggagcgatggaaataaaggtctgtgtccctctactggtggtcaagagcccaggttttagaaatccctcacagatttggtctgtgaccttaggcaagtataattatctctctgaacttcagtttcctcaactccccccaaagagaatgagacattgctactctgcagatggttatgaaaatcaaatgagctgattgctataaagtgcctgttacaaagatggtactctgcaaacaccatttccttttcattagctgtcttttgctttacctttcggaaaaactggggctcagggaaggaaaatgcctctcccagggccatacagtgaatcagtggcactggagtgaaatccctgtccttataaaaataaagtgaggggctaggcacagtggtttatgcctataattctagcactttgggaggctgaggcaggcagatcacttgaggtcaggggttccaggctagcctgcctaacatggtgaaactccgtctctacagaaaatacaaaaattagccaggtgtggtggcacatgcctgtaatcccatcttctcgggaggctgaggcatgagaatcgcttgaacctgggaggcgaaggttgcagtgagccgagatcatgccactccactccagcctgggtgacagagtcagactcaaaaaaataataataaggctgggtgtagtggctcacccctataatcccagaactgtgggaggccaaggtaggtggatcagttgaggtcaggaattggagaccagcctggccaacatggtgaaacccatctctactaaaaatgcaaaaattagccaggcgtggtggcacacacctgtaatcccagctactggggaggctgaggcaggagaattgcttgaacttaggaggcagaggttgcagtgagctgagatcatgccactgcactccagcctgggagatggagcgagactccatctcaaaagtataaataaataaaagaataataataataaggggctgggcacagtggctcatacctataatcccagcactttcgggaggctgaggtgggaggattgcttgagtctaggagcttgaggctgcagtgaatcatgatcatgtcactgcattctaccctgggcgatagagtgagactcaatctctaaaaatagttttttgtttttttttttgagatggagtttcgctcttgttgcccaggctggagtgcaatggtgcgaccttggctcaccgcaacctctgcctcccgggttcaagcgattctcctgcctcagcctcctgagtagctgggattacaggcatgtgccaccacacccagctaattttgtatttttagtaaagacagggtttctccatgttggtcaggctggtttcaaattcctgacctcaggtgatttgcccgccttggtctctcaaagtgctggggttacaggcatgagctatcgcgtccagccactgcttggattctgaggtcaagtggccctaggttcaaattctggctcagcccttttaaaaaattttttaaaagagggaaatagcagtccctgcttggttcttgcctctgaatcaggccctctctccaccttctccaacccaggcacacaggatatcaccgatgccagcgaaagggggctccacatgcagaagctggggtctgggtcagtgcaggctgcgctggcggagctggtggccctgccctgtctctttaccctgcagccacggccaagcgcagcccgagatgcccctcggataaagtggaccaaggtgcggactgcgtcgggccagcgacaggacttgcccatcctggtggccaaggacaatgtcgtgagggtggccaaaagctggcagggacgagtgtcactgccttcctacccccggcgccgagccaacgccacgctacttctggggccactgagggccagtgactctgggctgtaccgctgccaggtggtgaggggcatcgaggatgagcaggacctggtgcccttggaggtgacaggtcagttgggggcaaaggaggggccgggggccggggagagggagggctgagcctggagcccacccactgaatgtcaccttagaaatcactccctgagacctggcctggtgtctcatgcctgtaatcccagcactttggcaggccaaggcgggtggattgcttgagcacaggagttcgagaccagcctgggtaacatggtgaaacctcgtctccacagaaaatacaaaaattagccaggcatggtggcacatgcctgtagtccagctacttgggaggcataggtgggaggatcacttgagactgggaggttgaggctactccactccagcctggatgacagagggagaccctgtcacaaaaaaaaaaaaaaaaaaaaggaaagaaatcactctctgaaccgggattccctttgaattcttctgataaagtcctaaagtctttatggtgcctataatctgagcactttgggaggccgaggcgtgtggatcagttgaggtcaggagtttgagaccagtgtggccaacatggtgaaaccccgtctttaaaaaaaaaaaaaaaaaattagccaggcatggtgatgcatgcctgtgatcccagctacttgggaggctgaggcaggagaactgcttgaacccagaaggtggaggttgcagtgagctgagattgagccactgcactccagcctgggccacaccgcgagactctgtctcaaaagaaaaaaaacgtctgtatcagtatgggtactatcttgtctttaacacctctcttttttagctatgagagaggagtctccagctcagacttctgggggccacaatatctaggcaggatttttgtttgtttgttttgagatggagtctcactcttgttgcccaggctggagtgcagtggtgctatctaagctcactgcatcctccgtctaggcaggattttacttggagtcaattttatggttatctgattttatgtaagacaaaggatactggctttctatttaaaatagaaataaaaaattccttgtaaaataaacttaagtttttttctaagtgaggcaattttttaaaagtaagttaatttaagatgtatattaaatattaagcaagaacaattctcaaatacctgtttaggcaattcttttttttttttttttttttttttgagatgggagtctcgctctgtctcccaggctggagtgcagtggcatgatctcaactcatcgccagctctgcctcccgggttcacaccattctcctgcctcagcctcctgagtagctgggactacaggcgcccgccacagcgcctggctaattttttgtatttttagtagagacggggtttcaccgtgttagccaggatggtcttgatctcctgacctcgtgatctgcccacctcggcctcccaaagtgctaggattaccaggcatgagccaccgcacctggcaaccaattcctttattaaattcttcttgttgagctgcgtgtggtagtgcacacctgtagtttcagcactttgggaggctgaagaggaagggtcacttcagccaggaattcaagaccagcctgggaaacatagcaagaccctgtctctattagaaaaacaaaaacaaacaaacaaacaaaaaacaaaaaacggggatgggggcccagtggctcatgtctgtaatcccagcactttgggagaccaaggcaggagaatcacttaagctcaggagtttgagaccagcctgggcaacatagtgagaccttgtctatacaaaattccaaattccaaaacattagccaggtatgatggtgtgttcctgtagtcttagctactcaggaggctgaggtgggaggattgcttgagtcccaagagatcgaggctgcagcgagccttgatcatgccactgcactccagcctgggcaacacagcaagaccctgtctcaaaaataataataatatggctgggcgcagtggctcacgcctgtaatcccagcattttgggaggtcgagacgggtggatcatgaggtcaggagttcgagaccagcagatcatgaggtcaggagttcgagaccagcctggccaagatggtgaaaccccttctctactaaaaatacaaaaattagccaggcatggtggcacattcctgtaaccccagctactcgggaggctgaggcaggagaatcgcttgaacccaggaggtggaggttgaggtgagccgagattgtgctattgcactccagcctgggcaacaagagggaaactccatcttaaaaataataataataataataatacaactaaataagccagatgtggcggctcacacctctaatctcagcattttgaaagactaaggcaggaggattgcttgagcccaggagttcaagaccagtctgagcaagatggtgagacctcgtctctacaaaatttttaaaaaaatattagcagggcatgctagtgtgcgcctgtagtctcagcttgtcaggaggctgaggtgggaggatcgcttaagtctggaaggttggaagctgcagtgagctgagatcgcaccactgcacttcagcctgggtgacagagggagaccctgactcaaataaataaataaataaatagtcaaaaactaaaaataaagaacagggtttggcacacagtagatgctcaataaatgactcagtgaatggattattgtacagcaaacatcccgtggactcctgctgggaaacctgtttcccttaacttaaattgaccttgggcaagtccctgattcctgtcttggggcttaacctgcatgcccccaaactgggaactggggacacagtgtcttaccacatagtttatggagtcaaccagtcatcccctttcagaggcctcatttctgaaaattgataaaagctaacaacaacaacaacaacaaactgattggtggtgaggcaagtgaattccacatctaggtaacttcaatttcattcattcagccaaactctttttgttgttgtttgagacagagtctcactctgtcacccaggctggagttcagtggtgtgatcttggctcactgcacctctgcctcgtgggttcaagcgattctcctgcttcagcctctggagtagctgggattacaggtgcacacaaccacacctggctaatttttgtatttttagtagagacagggtttcaccacattggccaggctggtttccaactcctagcctcaagtgatctgcctgcctcggtcttccaaagtgctgggattacaggcatgagctgctatgcccggacattcagccaaacatttattgagcacctacactgtactggtccaatgctgaggacacagagctctcagttggataagccagagcaaagtgtttcatttcattgtcttgttcagccatttctttcatccctaaatcagaatttgaatcacagtgagcctgttaccagggcttcacatcctggcttacatgtcacctcctccaggaagccttccaggaccacatttccaggccaggcaagaaccacatttgggccgggcgcggtggctcatgcctgtaatcccagcactttgggaggctgaggtgggcggatcacgaggtcaggagatcaagaccatcctggctaacatggtgaaaccccatctctactaaaaatagaaaaaaattagctgggcgtgatggcaggcgcctgtagtcccagctacttgggaggctgaggcaggagaatggtgtgaacccgggaggcggagcttgcagtgagctgagatcgcgccactgcactgcagcctggcgacagagtgagattctgtctcaaaaaataaataaaataaaataaataaaataaaaaataaataaataaataaaaaagaaccacatttggtctcccattgctgcctgtgcttccctattagcgcatgcacttaattcctaaaaggcagaaactctctgtcagccttctccacacctcctgccacctccagggcctaaccctgggcatgaagagtgctatctttggagtcagatctctctgaatttgaattctggttctgtttcttatttgctgcgtgggcctggacctgtccctcaacctttctgaccctaagtttcctcctctagaacaatcagatttgttgtaagagttcaataagataatgcttataaatgcttttcttttttttaatgttttagtttttttgagatggagtcttgttctgtctcccaggctggagtgcagtggctcaatcccggctcaccgcaacctctgcctcctgggttcaagcgattctcctgcctcagccgccctagtagctgggattacagacgcatgccaccatgcccagctattttttgtatttttagtagagacagggtttcaccatgttagccaggctggtctcgaactcctgacctaaagtgatctgcccaccttggcctcccaaagtgctaggattacagaagtgagccaacatgcctgaacggccgtaaacgcttttcacattgtaaatatttgctaacttgtaaccctttatggccattgttatcagtttcctcatctgtaaaatgggggcatatggatcttgctccccaccctcgacccacactgtgcctggcgctaggtctattattatcagacaggggtggggagtcattctgcaagaggtaggtctgttcttgaagattccagcataagtcaactgtccccccatcctggatgttcccccacaggtgttgtgttccactaccgatcagcccgggaccgctatgcactgaccttcgctgaggcccaggaggcctgccgtctcagctcagccatcattgcagcccctcggcatctacaggctgcctttgaggatggctttgacaactgtgatgctggctggctctctgaccgcactgttcggtgagggggatacacagggcagggagatgaagactagctcatggggaaggaggttccttgggggctccaggagcacacatctgagagggaccctccccttgtgttgtcaggtatcctatcacccagtcccgtcctggttgctatggcgaccgtagcagccttccaggggttcggagctatgggaggcgcaacccacaggaactctacgatgtgtattgctttgcccgggagctggggggtaagtctgggactggcaggacccggcccctccgcctctctttgagtatctattattctccccaactcccatcctccggggtccttatgcaactcccctgtcttatacctccctaaacctgcaaccaagacatgattccactcattttctgagctttccatgcctccctgagtccccctccctccctttgcccccttcctctctctgatcctctttccctctctaatcccctgtcccctgcctgcctccctgtccctatccccttcctcctctgtgagcccccttcaccgagcccctccctctctctgaagcccgacttgcccatgggcctgagttactccatttgtaaaaagaggcttagctctgcatgagaggtaaggacaaggatgatcccggagctggacgcacagctgcggttgtcaccgcctcttctaaccaccaccctaacacgtccaggtcggaactatttggagttggacccacttcctgggctccaggggagggttccccagcccccctgacctccacccgcccctcccgcaggcgaggtcttctacgtgggcccggcccgccgcctgacactggccggcgcgcgtgcacagtgccgccgccagggtgccgcgctggcctcggtgggacagctgcacctggcctggcatgagggcctggaccagtgcgacccgggctggctggccgacggcagcgtgcgctacccgatccagacgccgcgccggcgctgcgggggcccagccccgggcgtgcgcaccgtctaccgcttcgctaaccggaccggcttcccctcacccgccgagcgcttcgacgcctactgcttccgaggtgcgtgcgtcccctggtggccgcgcccccagggctttcactttggcgaaggccacgtccctgaaagcctcgccaagccaagggagagacacatggaagctcgctttgtgataagccacatccctgggtgagggccacgcccccgggtgaaggccacacccgttacgacaagtctttccctaggagccccgtcctgggtaaagaacagggctccagaggaggccactctggtggggagtcacctttgctgggtgggctgtatctcctgaggtccggaggccccataaccttgaaagacaagcccctaggtggggcatactctacctagagccacgcccatacgcagaaacacccccgtggaagagataatgcctcaattggccacctctgggcaccacaccggatgtgggagcagggatgacactcgcccttgttggggggcagtggggacagctttggaagctgcaagcatcaaccccaaggagccatgtcctctaagtaagctgccccagtcctggcatgggcataccatgcccacggggcaccacctgtaccaggggaggatccgtcaccaaggttgagttgaacccctcaacaggcagacccaagttcatgagagttggacactacctgagctttgcccatgagccaaattgtctttttttcttttttcttttgagacagagtctcactctgtcacccaggctggagtgcagtggtgtgatctcggctcactgcaacctccacctcccttgttcaagcaattctcctgcctcagccttcggagtagctgggactacaggaatgtgccaccatgcccagctaatttttgtatttttagtagagacggggtttcaccatgttggccaggctggtcttgaactcctgacctcaagtgatccacccaccttggcctcccaaagtgctgggattacggacgtgagccaccgcgcctggcccaaattctcttgagtcctcactgcagccagttgactctgaccctgacagtggctcaggtggtctccagcctgaacagtggaggtgaaaattttgcacttccctctcccaggctgggggaatctcagaaactacttaggagagacagaggtacacagaaggcttatgctgcagcatgctggaaagtgggtagacttcaagcagaacttcccaggcaacccctgggcctaacacaacctcttctgctttctcccacagctcatcaccccacgtcacaacatggagacctagagaccccatcctctggggatgagggggagattctgtcagcagaggggcccccagttagagaactggagcccaccctggaggaggaagaggtggtcacccctgacttccaggagcctctggtgtccagtggggaagaagaaaccctgattttggaggagaagcaggagtctcaacagaccctcagccctacccctggggaccccatgctggcctcatggcccactggggaagtgtggctaagcacggtggcccccagccctagcgacatgggggcaggcactgcagcaagttcacacacggaggtggccccaactgaccctatgcctaggagaagggggcgcttcaaagggttgaatgggcgctacttccagcagcaggaaccggagccggggctgcaaggggggatggaggccagcgcccagccccccacctcagaggctgcagtgaaccaaatggagcctccgttggccatggcagtcacagagatgttgggcagtggccagagccggagcccctgggctgatctgaccaatgaggtggatatgcctggagctggtgagttgctctgggggaggcgggacctacctggggatctggaggtgagggtagagaggtagccatggctacactcagaatgagggaggaagctccaaatcccagctgggtcctctggccccagaagccccctctcccttgggcctggagtccaaccaaaggggctgctgagagatcattgtaatgattgccttgatgttgttgcaggttctgctggtggcaagagctccccagagccctggctgtggccccctaccatggtcccacccagcatctcaggccacagcagggcccctgtcctggagctagagaaagccgagggccccagtgccaggccagccaccccagacctgttttggtcccccttggaggccactgtctcagctcccagccctgccccctgggaggcattccctgtggccacctccccagatctccctatgatggccatgctgcgtggtcccaaagagtggatgctaccacaccccacccccatctccaccgaggccaatagagttgaggcacatggtgaggccaccgccacggctccaccctcccctgctgcagagaccaaggtgtattccctgcctctctctttgaccccaacaggacagggtggagaggccatgcccacaacacctgagtcccccagggcagacttcagagaaactggggagaccagccctgctcaggtcaacaaagctgagcactccagctccagcccatggccttctgtaaacaggaatgtggctgtaggttttgtccccactgagactgccactgagccaacgggcctcaggggtatcccggggtctgagtctggggtcttcgacacagcagaaagccccacttctggcttgcaggccactgtagatgaggtgcaggacccctggccctcagtgtacagcaaagggctggatgcaagttccccatctgcccccctggggagccctggagtcttcttggtacccaaagtcaccccaaatttggagccttgggttgctacagatgaaggacccactgtgaatcccatggattccacagtcacgccggcccccagtgatgctagtggaatttgggaacctggatcccaggtgtttgaagaagccgaaagcaccaccttgagccctcaggtggccctggatacaagcattgtgacgcccctcacgaccctggagcagggggacaaggttggagttccagccatgtctacactgggctcctcaagctcccaaccccacccagagccagaggatcaggtggagacccagggaacatcaggagcttcagtgcctccgcatcagagcagtcccctagggaaaccggctgttcctcctgggacaccgactgcagccagtgtgggcgagtctgcctcagtttcctcaggggagcctacggtaccgtgggacccctccagcaccctgctgcctgtcaccctgggcatagaggacttcgaactggaggtcctggcagggagcccgggtgtagagagcttctgggaggaggtggcaagtggagaggagccagccctgccagggacccctatgaatgcaggtgcggaggagggtgagtacaaagtcccggggctctgtccagctctccatggtcagggcttggggagcaggggctgggggatcccagagcagggaggaatggttgtccctggggatctggaagctttctagtggggcatgacgctggaggtaggagcttatcaggtggagttgaatttcagaaaggacattcctggcagaggaacgagcactggcaaaggccaggagatgaagtagcgcttgatcaatttcgggcacagagcatacatcccaatgaacaaagtgtgagagtagtgagtggccgggcatggtgcctcatgcctgtaatcccagcactttgggaggctgaggcgggcagatcacttgaggtcaggagttcaagaccagcctggccaacatggcaaaactccgtctctactagaaatataaaaattagccgggtgtggtggcacacacctgtaatcccagctactggggaagctgaggcataagaatcgcttgaacccgggaggcggaggttgcagtgagctgagattgtaccactgcacttccagcctgggtgacagagtgagactctgtcaaaaacaaaaacaaaaacaaagtgtgggagtggcgaggcattgagtagagtctgatttggggatgagttcaggtacaagccatgtctacatctgctttgagctggacagtggtgtgatggactggctttccaggattccccgagtctgaggaagacagagcaggacacagacgcctcccaggcgagaccagagggaggaggcatggcagggagggtttcctggacaaatgtgaatgggagctggaattcggtgatttgactcgtgggggacctcaagccacagggaaagtgggtgctggggagccatgcaaggggcgagaatcacccccattctacagatagcaaaccggggctcagggaggtaaaacgccgcttggctaatcagtggtcacacctcaactggagcccaagtcagcctgagtcttagctactctgtggccagcagcgtccatagaaatcggctgccctgttctccctggggccaggtcagcctcagctcagcctgcaaattccagcccttcttaggttctgccaaattaagctgagttttttggccaaatgaaatttagaaacaaacaaacaaaaaagaggctgcgtgtgatggctcatgcctgtcatcctagccctttgggaggctgaggtgggagaatctcttgagctcaagagttaagaccaggctggccaacacagcaagaccccatctctactaaaaataaaaagaaattagccaggctgcagtgagctatgatagttccaccgcgagaccctgcatgaaatcaaactaacaaaacaaaacaagcagctaattaataagtctttttttctgagttgcacactttttttttgtttgttttttgagactgagtctcactctgtcatccagcctggagtgcagtggtgtgatctcggcgcactgcaacctccgcctcccaggttcaagtgattctcctgcctcaaccttctgagtagctgggattacaggctcccgccaccacgcctggctaatttttgtatttttagtagagacaaggcttcaccatgttggccaggctggtcccgaactcctgacctcaggtgatccacctgccttggcctcccaaagtgctgggattacaactgtgagccatagcacccagtcgagttgcacacttttattaacaccattgatgtttaactaccgcaccccccacccccaaatttttttttttttttttttagaaagggtctcactctgtcacctaggcttgagtgcagtggcaagatcgtggctcactgcagccttgacctccccaggctcaggtgatccttctgcctcaggctcccaagcagctgggaccaggtgtgcaccaacaggcctggctaatttttgtattttttatagacagggttttgccatgttgcccaagctagtgcccgtttttttgaaggcaaagtgtcatgatgatggaaatagctgatgcaggtttcatcatccagcctgtcacttctgggctgtgttggggtgggatcttttttttttttttccttttttttttttttccagacagggtcttggtcagttgttcaggctggagtgcagtggtgcaatcatagctcactgcaccgaggctcaagtgatcctcccacatcagcttctccagtagcttggactacaggcatgcaaccaccacacccggctgtgtgtgtgtgtgtgtgtgtgtgtgtgtgtgtgtgtgtgtgtgtagagatggggtctccctatgttatccaggctggtctcaaactcctgggctcaagtgatcctcttgccttggcctcccaaagtgttgggattacagacatgagccgtagcgccgggcagttctttttttcttagatgtccaggaggcaggccgaccgccccaccccgtatcgataaaggctgacatttatgggttactgccagtgtgcttggcttattcaaagcactttactggagttatcttggttaatccttttaatgtccttatgggaaaagctccagtgtgatccttactttgcagatagggagacagacacagagaggtgaagtgccttgtgcagccatgcaactaagggagtgtcaaggctggggtttgaatccaggtcatctgaacatggggtttcttttttttttttttttgagagagagagtctttctccgtcgcccaggctggagtacagtggtgatctcaggtcagtgcaacctccgcctcccaggttcaagtgattttcatgcctcagcctcctgagtagctgggattgtaggcgtgcaccaccatgtctggctaatttttatacttttagtagagatggtgtttcaccatgttgaccaggttggtctcaagctcctgactcaagtgatctgcccgcctcagcctcccgaagtgctgggattacaggcgtgagccaccgcacctggccggaaaacagagcttctgtctcagccactaggctgcgaaatgcttagctcgttggcataaaaaagtacatgaggccgggcatgatggctcacacctgtaattccagcactttgggaggctgagacggaggatcacttgagcccaggaattggagaccagccttggcaacatagtgagaccccgtctctacaaaacaaattttaaaattagccgggcatggtgggtacctgtggtcccagctactcaggggtgctgaggtgggaggaccgcttgaccctgggaggttgcagctgcagtgagctatgatcatgcaactgcactccagcctgggggacagagcaagactccatctcaaaaaaaaaaattaatcttggggtggtggtgaggagagaagagacgggctaggtggggatcaaccctggaaagatgatcagaggggaagaagctcaatgcccaaagaaatagagaaggggcagtcagagaggtgggagggcgaccacataggaacactaaggaaacgggggttggagctgcacctgggctgaggctgagtctgtcttggacttttctggatcctgggctccacaatgaagccaaccacagcaggatggagattggcgggcagtgctggggagacccaggcagctacccacccgccgcttgcagaagaaatgctaatgaagccaaaaataaatgcagtaccagcgagtgactgagtcaccgccagtccgtgggcaggtgtcagcagcgcggggcacctggcggggctcatgtgtcccgccgcctggcagccttgtgcgtgtgcacacacgtgcagggccgtcgtccagccacaggccctgccatccacaagcccgtttgccatccatggggccaccccagggacaggcctcagctaccgcaggagggccagctgctaccttcattccgttagcaagcaattactgagtgcctattctgtcccagaccatatgttgaaaccaaatcccctctcctctgaaaactgacgtcctagagcaacattctagaactttcccagggatggaaatgttctctatccacgctaatttgaaaaatggctaggacaactgagggacgacgtttttacttttatttcactttaattgatttaagcgtgaatatctatatgtggctgccatatggaacaccagtgctctagggaaagatacagacaagaaacgattgttctaataaaaaaagtaaagtagtgctcgcttcagcagcacatatgctataattagaacaatatagagaagattagcacagcccctgtgcaaaaaatgaagcatttcattcttttttttttttatgagatggagtctcactctgtcacccaggctggaggcgcgatctcagctcactgcaacctccgccttcggcattcaagggattctcctgcctcagcctcccgagtagctgggattacaggttcctgccaccatacccagctaattttttgtatttttagtagagatggggtttcaccatgttggccaggctggtctcgaactcctgacctcaggtgatccacctgccttggcctcccaaagtgctaggattacaggcatgagccatggcacctggcctctttttttttaatttaatttttcaaaaaatttaattccactgggcagtggaatggtcagatgctgccctgacaggatctgggttggctggagcaggatgaggattttttttcagtctgtcacccaggctagaacctatgtccactcctgtgccccaattcatgagaagcacagtgatgagcagggtgtgcccaaaggaggggaaggacactgaagtcagggaggacactgaagcccatgttctgggagaagacattctacgaggtccttcaggcagccctggtctctgggagccccattccagttcagtctgaggaaggactttgctacaggcaggaaagtccccagatgctttggggcagtttctggaagcagtaaactcctcgtaacaggggtcatatgggagggagttggtgaccgctggttggggaagttataaagagggctccatagagagggtttgattagagtggtttgggggcctggggtcttgattccaggaaggcaaaagatctgtggcctgactcttccccacactacccatccatcctgcagtgcactcagatccctgtgagaacaacccttgtcttcatggagggacatgtaatgccaatggcaccatgtatggctgtagctgtgatcagggcttcgccggggagaactgtgagattggtgagtaccccagactcaggatctgaatctgaatttgtttgactccagagccttgggttgtactccagcagccatgccctcagaattcagagatcacaaaaagctggtttcagatgctccattcccaaaccccactccttgcattcagctaaatcagcccagttagtggaaccagaatcaaacagctgagctttcatctctggtgtgctgtctcccattactaccagtcagaggtgggaaggaaaagacaaaggaattatatgtctgagactcctccctgcaaaggccctttggagatcctgccctttcctgggtcggtgggaggtataagcactgccaccagaactgttgggtgctagcttcaaagcccaacacaagaaatactaccaattatgaaattacaacaacaaatataaatgacataattttttgagctctatgtgtcatcttgacttcacaaccttcacaaccacatgactgattacagaattataacaataaatataaatgatataatttcttgagctcttctattgcttccctactcacaatcatccttgagtaggagcccattattattaccattttcaaaaaaagtaagctgagtttcaaggaggggaagtgacttgcccagtgccatacgtgcctcaagcactgtctacacatggaccagtagaagaggagctcaatgaatatctagctttacccacaaacagctttgtgactctgtgcaagtctttgcaaatgcctaaaagagactccagcttcagcattctatgagcctgtttttgagagtataaccttcacttctctagagtcaggtagaacagtctgcacatcctggctctcagctgccccagtggcatctgctctcattaatgctaatttatgttaattgtatgaggttccacccccttgcctgcagagtcattgggccatctgtgcaaactgtgactgctgcacttaggtccaggatggatggtaggaccatgaccccatcttctgcttagtttcctgtgggggctcagagccaaggggaagctgacctctaactcagtctcttcccctctctgccagacattgatgactgcctctgcagcccctgtgagaatggaggcacctgtattgatgaggtcaatggctttgtctgcctttgcctccccagctatgggggcagcttttgtgagaaaggtgagtttctattgcaacaccagaaacagtaccaagagtggggttgggtgcccagccacaggcttccccacatactccaggtccctgcctccagttccatggctgtgagcctgacacaagataaattattcttttagacaaactgtgcgtaacatagaattaaccattttactttattttattatttttttgagatggaatcttgctctgtcacccaggctggagtgcagtggcgccatctcagctcactgcaacccccacctcccagtttcaagcaattttccctgcctcagcctcccaagtagctgggattacaggcgcccgccaccacgcctggctaatttttgtattttttagtagagatggggttttgctatgttggccgggctggtcttgaactcctgacctcaggtgatccacccaccttggcatcccaaagtgctggaattacaggcatgtgccactgcgcctgccctattttattttattttttttttttgagacagagtctcgctctgtcaccaggctggaatgtagtggcacaatctcagctcactgcaacctccaactccctggtccaagtgattctcctacctcagcctcccgagtagctgggattacaggcacacgccaccacgcctagctaaatttattttattttttgagacagggtctcaccctggcacccaggctggatggagtgcagtggtgcgatcttggctcattgcagctttgacctcccaagctcaagtgatcctccctccttagcctccccagtaggctgggactacaggcacacaccaccatgcctggctaatttttgtattttttgtagagacaaggtttcaccatgttgcccagactggtcttgaactcctgagctcaagcaatctgtccacatcagcctcccaaactactgggattacagccactgagcccagccaaattaaccattttaaagtgtacatttcagtggcattctgtacaatcacaatgttgtacagccatcacctctgtctagttccagaactttttcaacaccccagaaggaaactctgtgcccactaggtggtcactccctattcccattccccagtccctggcaaccactaatctgctttctgtctctgtggatttgcctgttctagacatttcatatgaatggaatctcaaaatatgtgtcttttgtgtctggcttctttcacttggcatgttttcaaggttcacctgtattgtaatatgaatcagtgtttcattccttttcatggctgagtagtattccattgtatggctatatcacattttgtttatccattcatggtttgatggatatttgggttgtttcctccagaggctaaggtcaatagtgctgctgtgaatatattcttgtatgtgtttttgtttgaataactatttgccattcttttttttccctctactctttttggtgtatactctcaggagtggaattgctgggtcatatggtaactctaggtttaatttactttttttttgtagagatggggttttgccatgttgcccaggctgctctaaaactcctgggttcatgtgatcctcctgcctcagcctcccaaagtgctggaattacagacatgagccactgtgcttggccttttttttttttttttgaaacaggttctcactctgtgcccaggctggaaagtacagtggtacaatcatagttcactgtcaccttgaactcccaggctcaagcgattctcttgcttcagcctacccagtagctggaactacaggtttgtgccaccatgcctggctaatttttatttttttaatttctttttatttttattttttgagacagggtctcactctgtcacctaggctggagtgaagtggtgtgatcttggctcactacaacctccacctcccggttcaagtgattcttgtgcctcaatctccccagtatctgggactataggcacctaccaccacacgtgactcaattttttttttttttgaagtttagtagagatggggccaggctggtcttgaactcctggcctcaagtgatccaccagcctcgacctcccaaaatactgggattacaggcatgaaccaccatcctcagcctacttttccttttaaaaaaaaattatatgtaatcccagcactttgggaggccaaggcaggctgatcatgtcaggagatcaagaccatcctggccaacatggagaaaccccatctctactaaaaatacaaaaattagcaggcatggcgacacgtgcctgtaatcccaggtacttgggaggctgaggcaggagaattgcttgaacctgggaggtggtgtctacagtgagccaagatcgcaccattacactccagcctgggcaacagagccagactccatctcaaaaaaaaaaaaattttatatatatatatctccatcctagtgggtgtgaagtgatatctcatggtggttttgacattgacaatgagcatcttttcatgtgcttgttggccatttgtatgtcttctgtggagaaatgtctgagctcccatgtccatacgaagggtgtggccccgacatcagagaaggagccttcagcattggaatgagagggggtgtcagggaatgatctcccagttaaatctcttccagaaacaaagaaaagacattaagatttggccagtgtggtggctcacgtctgtaattccagcattttgggaggctgaggtgggcagatcacttgaggccaggagtttgagaccaacctgaccaacatggtgaaaccctatctctactaaaaatacaaaattaggtgggcgtggtggcgcacgcctgtaatcccagctactcaggaggctgaggtgggaggattgcttgagtatgggaggcggaggtagcagtgagccgagattgtgccattgcacgccagcctgggcgacggagtgagaccctgtccaaaaaaaaaagaaaaaaaagaagtcaatatgggaggtgaaagggttgggagagcagagcctcaggaggaggggccaggcatggggagaggggtgatttcgccccgcagtgaccttggattgggccctctctctggtgggctggctgtgctcatggctggtaggccttgggccaaggccagccccccctcacgctcctatcccatctcccagacaccgagggctgtgaccgcggctggcataagttccagggccactgttaccgctattttgcccaccggagggcatgggaagatgccgagaaggactgccgccgccgctccggccacctgaccagcgtccactcaccggaggaacacagcttcattaatagtaggggctctggggagggggccacctgcctggagggtgggcaggggtggcacttgtagcccttttgccagggcatcgcatccctcccctggttttcaagacgtcatctttccaaagctgtgttcattaacgcaagccctgactgcttcttaatgcatgaaatctgtcaattcacttgttaattcatacattcacttcattcattcattcaccaaatatttactgagcacctgctatatgccaggcaccattccaggaatattgacacagcacagcagcaatcaaggctgactttgctttgtccccagggagtgaccatttcttggggaggatatagacaaacaagtaaatatctaagtaaataagtctatactgtaattcaacagatcctatgtgtgctgataacaaaacagggccaggagatggagggtgatgggagaagcacctgtaatgtgttcaaagacctaggagagagacaagtgttccattcatgtaatccgggacttattgatttattcattatccctctgccttctgctcatccatccatttattctgtttattccgtttgccaccatcccatccctcgtgactccttcctttcttccttccctgatttgtttctttttccttgatgtatcccactgggcctctccctcctgagcgactggctcgcgccttctcacctatctgcccgtccagcgcccactggcgtctcctgtcccctacttctcatttctgcaaagatgcaacagtgcccgggtttactcctgcttctcctggccacaaaccctgggatagcctgggcctacttccggttcttcccatgcctcacccccctaaaagagggtagccagagtccccacttgtggagggtggggtgaggatgcacctccagcctacactgaggctgggagaggggttcatgcctgccccctaccctcctcctccttcctttccctcctacctccccatcttccctcccactcctccccctcctccttctatacctcttcctccctcttccccatcctccctccccctcctctccctcctccttccattctttctcctcctccctcctactcctccccttctccctcctctcctccccttcctccttccactcatcttccacctcctttctcctctccatcctccctcccctcctccctctcctcctcccattcctcctcttcctctctcctctcctcccccttccctccccctcctccttccactcatcttcttcctcctttctgctcctcatcctgcctctccctcctcccattcatcccctcctccctcctgctcctccccaggcctcctcccttctactcctcctccttctccttcctcttccccttgctcttcctcctcccttccactcctcctcttttctcctccccattcatctcccactcttccccctcctccctccaactcctcccctcctccttccattcatctttctcctcctttctccttcccttcctcctccctcttctctccttcctccctcccattcctctgcctcctccttccactcatcttcctcctcctttctcttccccatcctccctcccactcctccccctccttcttccactgatctttctcctcctttctcctccccctcctcctcccattcccccctcctccctcctgctcctcatcctcccttccattcctcctccctcctccccatccttcttcccactcctgcccctcctccctttcactcctcctcctttttcctccccctcatctctctccttctcccttccttcccccttcccttctccagctcttacagaggttagggagggcatctgtgtactccctcacctctgtaaacttcacttctatctccttccctctccacctcaacctccagcccacctccaggctggggaaggggctgagtcttcccctcccatacatacctcacccggcccccagcccacagagaggctgagggaggggctctgggtcctcctccatccctgtacctgcttcttccctcttcatttccaccttctagatctttccccccacccagcccacctccaggctggggaaggtgaggaattctttcctcccacaccctaccccacctcacctgcagcctgtgccctgggccaggagaggcatgggtgaacacccagacccacaacccccgaccctgcaggctttgggcatgaaaacacgtggatcggcctgaacgacaggatcgtggagagagatttccagtggacggacaacaccgggctggtgagtggcaggggctgcgggcctaggctgctgagccacatcagccctgccatctggcctcagtttacccttttgtgcaaagttatcgcaattgggtgtcagaggtctctagtggctccaagatgctggagttggcaaaggagcttcaagtgaaggctaaaccttctcccctgacttccccagcccaagtaaacagaccgcgcccacgaagctgcagaggttacaaacctgagactagggtctgatgcctcccctactcactctgcctggtcccccagccatggtctctcaaatattctcatttctagcctgggcatgatggctcatgcctgtaatcccagcactttgggaggccaaggtgggcacttgagactagcctggccaacatggtgaaaccccgtctctactaaaaatataaaaattagctgggtgtggtggcccacgcctctaatcccagctactcaggaggctgaggcgtgagaatcgcttgaacctgtgaggcggaggttgcagtgagccgagatcactccactgcacttcagcctgggtgatgatagaacgagatcctgtctcaaaaaaaaaaaaaagtatatatatgccaggctggtggtccatgcttgtaatcccagcactttgggagactgagtgaggaggatcacttgagcccaggagttcaaggctgcagtgacctgtgatcacatcactgcactccagcctgggtgacagagcgagaccctgtctctaaaaacatattagctcagcatcctccctgcttcaagccctcccagactctccattgttctcaagataaaaattccccttctcccgctgtgtaaaaatctggcggttcctcacacagttaaacatagaagctgggcacagtggtacgagcctgtagtctcagctatcgggaagctgaggcgggaggatcacttaagcctaggaattggaatccagcctgggcaacacagtgagacccccgtctctaaaaatataaaaataaaaataaaaagttaaacatagagttaccacatgacccagcgattctactactagatacatacccagaagaattgaaaacagagattcaaagtggtacaaaaatgtacattattcgggtcatggatacactaaaagccaagactttgccactagatgatatatattttattatatgcatatgcatataataaaattgcacttgtaccctttaaatttatacacagaggccgggcacagtggctcacgcctatgatcccagcactttggaaggccgaggcaggcagatcacttgaggtcaggagttccagaagagcctggccaatgtggtgaaaccccatctctactaaaaatacaaaaattagctgggtgtggtggcatgtacctggaatcccagctacttgggaggctgaggcaggagaatcacttgaacccgggaggcagaggttgcagtgagccaagatcacaccatttcactccagcctgggcaacagagcaggactccatctccaaaacaacacaaacaaacaaaaaattgtactaagaaagaaaaagaggctgggtgtggtagctcacacctgtaatcccagcactttggggaggccaaagtaggaggatcgctggagcccaggaggttgaggctccagtgagctatgattgcaccactgcactccagcctgggtgacagagcaagaccctgtctcaaacaaaacaaaacaggccaggcgtggtgggtgactcacgcctgtaatcccagcactttgggaggtcgaggcgagtggatcacctgaggtcgggagttcaagaccagcctggccaacatggtgaaaccctgtctctactaaaaataaaaaaatagctgggtgtgatggcacatgcctgtagtcccagctacttgcgaggctgaggcaggagaatcgcttgaacctggaaggcgtaggttgcagtgagccgagatcgcgtcactgcactccagcctgggtgacagagggagactctgtctcaaaaaacaaacaaacaaacaaaaacttgtacatgaatgttcacagccccactattcacaatagccaaggtgggaacatccaaaatacccatcaacagatgaaggaagagacaaaatgtggtccatccatgcaatggaatattgttcggccataaaggagaagttggccaggtgcagtggttcatgcctgcaatcccagcacttttggaggccaaggtgggtggattgcttgagttgtggagtttgagaccagcctgggcaacatggcgaaaccccatctctacaaaaaattcaaaaattgagacagagcgagactccggctcaaaaataaaataaaataaaataataaacaaaatgtggaatgagccaggcatagaaggccagctgttgtatgatttttttttttcatgaagcattcagagtaggcaaatttagagacaggaagtagattagtgtttgccaggggctggggtcgggagaagggggagtcactagtgctcaatgagtacagaattttggtgtgttgtgatgaaaaagttctggaaataggctgtgcggggtggctcaggcctgtaatcccaacactttgggaggctgaggtggatggatcacaaggtcaggagttcaagaccagcctgaccaatatggtaaaaccctgtgtctactaaaaatacaaaaattagccaggcgtggtggcgtgcacgtgtaatcccagctactcaggaggttggggcaggagaatcgcttgaacctgggaggcggaggttgcagtgagccaagatcatgccactgcactccagcctgggcgacagagagagactccatctcaaaaaaaaaaaaaaaaaaagaaaaagaaaaagttctggaaataacaatgatggttatgcaacattgtgaatgtaattagtgcattaaactgcacaccgcctcttgaacccgggaggcggaggttgcagcgagccaaggtagcaccactgcaatccagcctggataatagagactctgtctcaacaaaataaaaataacaataaactgcacacgtaaaaatggttaaaattggccaggtgcggtggctcacgcctgtaatcccagcactttgggaggccaaggtgggtggatcgcgaggtcaggagttcaagaccagcctggccaacatggtgaaaccccatctctactgaaaatacaaaaattagctgggcatggtggcgcatgcctgtaatcccagctactcaggaggctggggcaggagaattgcttgaaccgggacctgggaggcggaggtagcagtgagcgagatcgcaccactacactccagcctgggctctgtctcaaacaaaacaaaacaaaacaaaacaaaaatggttaaaattaggaattatgtgctatatatattttgcgctatatatattttgccacaatttttaaaaattcacttccttttctctgatgcaagatctggtccctctctactctctgagcacaccccagccccatcacgcagctccagccccactgggctttgtctgttcctcaagcagaacaagttcagtcctgcctctgagccttcacactggtggttccctttgctaggaatgctgttccctgtctgaacccttactatctttttttttttttttttgagatagaatctcactccatcacccgggctggagttcagtgatgcaacccagctcactgcaacctctgcctcccaggctcaagggattctcctgcttcagcatcccgagtatcttgggactacaggcgcgcaccatcatgcccggctaatttttgtatttttatgagagacagggtttcaccttgttgtccaaggtggtcccaaactcctgacctcaagtgatctgacccccttggcctctcaaagtgctgggattacaggcatgagccactgagcccggccttgaatccttactatctttgattctttaactctcacattgcctcctcagggaagtcctcctggacttcgggctgagatcaccatttgtcccaccatgtatcttttttctttttcttttcctttttttttttttttttgaggcagagtctcggtcttgtcacccaggctggagtacaatagcgcaatctcggctcactgcaacctctgcctcccgggttcaaacaattctcctgctgggattacaggctcccactaccatgcctggctaattttttgtatttttagtggtgatggggtttcaccatattgaccaggctggtcttgaactcctgacctcaggtgatccgcccacctcggcctcccagagtgctgggattacaggcatgagccaccaggcctggccttgtcccaccacttatctaacactgattcatgttgaaaatgaactgggtgcggccgggcacccagggaggcaggaggaccagggaggagaatgctgcagcctccaaaccagaggaatggtgtattggattacagtggtggcccccgtcaggatgggcaggacagtggccattgtagagatgggaacactgaatccctgtgagtttgaggggtctggccaggggagtcccacagcaggaattgccagaacctgggctggaacagaggtcccctgaacaactccctgccccctattcctgcagcaatttgagaactggcgagagaaccagccggacaatttcttcgcgggtggcgaggactgtgtggtgatggtggcgcatgaaagcgggcgctggaacgatgtcccctgcaactacaacctaccctatgtctgcaagaagggcacaggtatgctgtgccccctgcttcttttcctctctgtcacttttgctcactggttctctgttgcccaggctggagtgcagtggcataatcatggctcatcacagcctccaccgcctgggttcaagccatcctcctgcctcagcttcccgagtaggtgggactataggcatgcaccaacatgcccagctaatttttgtattttttgtagagatggggtcttgccatgttgcccaggctggtcccgaactcctgggctcaagcgatctgcctgtctcagcctctcgaagtgctgggattatatgcataagccattgtgcccagccttgattcatttttttttttcatgaagcattcagagtacacaaatttagagacaagaagtagattagtatttgccaggggctagggtttgggagaagggggagtcactagtgcttaatgggtatagaattttggtgtgttgtgatgaaaaagttctggaaataggccgctcggggtggctcatgcctgtaatcccaacactttgggaggccaaggtgggtgggattatattttatttttttaatttattcttattttgtttttacttatttatgtttttggagacagtttcgctcttgttgtccaggctggagtgcaaaggcatgctcttggctcacttcaacctctgcctcccatgttcaagtgattctcctgcctcagcctcctgagtagctgggattacaggcgtatgccaccacgcccagctggtttttatattattagtagagacggggtttcaccatgttggccaggctggtctcgaactcctgacctcaggtgatccacccacctcggcctcccaaagggcagggattacaagcatgagccactgcacctcgccttcatctttttaagttggtaaatgtcagtgcagccagttctcactttccaccagcgtatgagagtgcttgtttcctcccacccttgctaactctgcacattcttaaacttttgttctttgttcatctaagtggggaaaaatagtatctcattgttatcttagtttgcatgcctttaaggatgagaataaccagttgttttttgtttgtttgtttgagatggagtctcactctgtcatccaagctggagtgcagtattgcagtctcggctcactgcaacctccgcctctgaggttcaagcgattctcctgcctcagcctcccgagtagctgggattacaggcacacaccacacctggctaattttttttttgtttttgtatttttagtggagacggggtttcaccatgttgaccaggctggtctcaaacttctgaccttaagtagtctgcctgcctcagcctcccaaagttctggggttacaggtgtgagccaccgtgtctggcctaaccaactgtttatatgttgacagcctgttggcatatatttctttccctgtgaactgtcaattcatctcttttgcccagttttctattgacttgttgatcttactgatttttaagagatctttatatatgaaagaaatcatttgtatacatttgtacatccacctttattttatactttggtttatttttgtttccatttctttgtcaattttcacatcctcccccccatttattcatgtatttatttatttatttttgaaacagggtcttgcaatgttgcccaggctggagtacagtggcattatcacggctcactgcagatcacttgaactccagggctcaagtgatactcctacctcagtcttaccagtagctggactacgggtgcacaccaccatgcctggcttatttatttatttatttattttgagacggcgtcttgctctgtcgcccaggctggagtgcagtggcgcaatctcggctcactacaagctccgcctcccgggttcacgccattctcctgccttggcctcctcagcagctgggactacaggcgcacgctgccacacccagctaattttttgtatttttagtagagacgatgtttcaccgtgttagccaggatggtctcgatctcctgaccttgtgatccgcctgcctcggcctcccaaagtgctggaattacaggtgtgagccaccgcacccggcccttattttaaaatttttttgtagagacagggtcttgctgtgttgcccaggctggtctcaaactcccggactgaagcaatccttccacctcagcctcccaaagtgctggcattacaggcctgagctgccgcacccggcctttatttgctcagataattattattgccgtctgtctccttcattcccattgtgccctatgtttggtgtaagaattagaaagtgaggtgtgtccgggaggttgctgtccctaaggagctgctgatttgggtagaagagacagacagacacagtcacttccagccctgtgagataagaactgggcagaggcagggacctgttgacgagctgaggggggtgtcattcccaataaaactcagcttgagcccatgagttcaaaactagcccgggcaacatagtgggaccctgtctttacaaaaaatcaaaaaattagctaggctcggtggtgcgcacctgtagtctcagctacttgagaggctgaggtgggaagatcccttgagcctgggaggttgaggctgcagtgagttgtgattgtgccactgcactccagcctgagcgacaaaggaagacgctcttttaaaaacaacaataagagccaggcacggtggctcatgcctttaatcccagcactttgggaggacaaggtgggcagctcatctgaggtcaggagttcaagacccgcctggccaatatgacgaaacccggtctctactataaatacaaaaattagccagccatggtggtgcatgtctgtaatcccagctcctcgggaggttgaggcaggagaatcacttgagtctgggaggcaggggttgcagtgagccgagatcacgccactgcactccagtctgggagacagagtgagaccctgtctcaaaaaaggaacaaaaaaatacaaaaattagccaggtgtagattacaggcaggtgcctgtaatcccagctacttgggaggctgaggcaggagaatcgcttgaaccagagaggcggaggttgcagtgaggcaagagcgcgccactgcactccagtctgggtgacagagcgaaactctgtctcaaacaacaacaacaacaacaactagtttagccccagatgtgagcacctctctcactagagattcctctgtcccagtgctctgtggtccccctccggcagtggagaatgcctcactcatcggtgcccgcaaggccaagtacaatgtccatgccactgtaaggtaccagtgcaatgaaggatttgcccagcaccatgtggccaccattcgatgccggagcaatggcaagtgggacaggccccaaattgtctgcaccaaacgtaagtagcttctcccagagatctcaacataggtttttggtatttctagtttccaagtaagacatcctatttctccacacattgatctggcttaatgtctgcctgataatacagccttgcagataagtgagaacttaccagcctgtctgatgtttccttcatttgtgtgtgtgtgtgtgtgtgtgtgtgtgtgtgtgtatgtgtatgagagagagatggagttgtgctctgttgcccaggctggagtgcagtggcacaatctcggctcactgcaacctcccgggttcaagcgatccttgtgtctcagcctcctgagtagctgggatcacaggtgtccactgccatgcccggctaatttttgtatttttagtagagacagggtttcactatgttggccaggctgatctcgaactcctgagttcatgtgatcagctcacctcagcctcccaaagtgctgggattacaggcgtgagccaccacatccggcctggttttgttttttttgaaacagagcctcactctgttgcccaggctggagtgcgaggctcaatcacagctcactatagcctcatcctcccagtctcaagggatcctccaaactcagcctcccaaatagctgggactacaagcatgtgccgccacgcctggctaatttttttatttttgtagagataggttctcgctatgttgcccaagctggtctcaaactcctggcttcaagagatcctcccactttggcctcccaaagtgctgggatgacagggatgagccctcgcgtctggcctctttcctctactttctctcccaaggacacccgctgcatcaggccacctgcctctcaccaccttttgtcccttccctgtcctccctcacttccctgcagccagacgttcacatcggatgcggcgacaccaccaccaccaccaacaccaccaccagcatcaccaccacaaatcccgcaaggagcgcagaaaacacaagaaacacccaacggaggactgggagaaggacgaagggaatttctgctgaagaaccagaaaaaagaaagcacaacacctttcccatgcctcctctggagccttcgcctggggagacagaacccagagagaaacaagagagtccagaagtccctgaaccccaaaccacatcccccacacacataatcctttgtacaaagctcctcttttccctttttttacatacacaagatcctcttggcaggtggagccaggtgtctgaaaagttcattctcgtctggctgaactctgggagtgtgtcccagctgagggaagcacaagtagcaaagctcattggtctggtctcttgtttgccaggctgattgaagcaggccttgatgagggtgcatgagtgtatgtttgcattcacatgaaggaattgcttttcacaccagaaattcagacttagtcaatgttggctgaattcctaaatccaggaagaagcctggacgtagggtcattagctttgggaatagaaggctacacagaagcacactgtttttgaacttgacaacagctctccctttaccctggacttcagcccaagttccgtctttggtcttggtggataaacacacagtgtggagatcccacgtactgcattttagggatgtttttaggacaacctccctccatgccttcagagttaggagtgagaatgatcaaagcaatatgtaggtgatggagggagagtgtattgctaacccttccaggtctagtccagcgctgagatttggtggttctgcatgtgtgatgaatctctttcacacaaatagacgagaggatatttagggctagatgagcccagatttcttccccctccatctctcagggagacaaagaacctccttcctggaccaaggaggtgctgccaagttttctagcccagtgcacatacccagtccttaagcagacattggtagtgcccctgccctgggtcccactcctgccccaccccacccttgtccctggccattgcctggtggtctagaaacacttaaaacttgaagtagtgacacctacctgcggtcatattgtagagagatgctcagtgttaaaactgaaacacacaaacacacacacacacacatttttctcttgtagattttaattttttaagtgggaaagaactcaccttgccttcctcccccaaatgtgcaacctgtaaaaggtctctccacaccaggggccaggatccagttccctcatctctggcaggaaagatccacagcttttcctccatgtctgttactcactttcagcagtccgggtaaaatctgtggatcagggttaaaaaagcaccgtggagaatggccctcttcaggaaagaaaaataagcaaatgaatggtccacctaggggttcagtaaagaaagaaatgtgttaactgagcctgaatcccttctgggaagtaataatgaccattgacaactaagaagtagacaccatgctaaagacttacatacaatctccttgaatcttctcaatagcccattgacttagaaactgttactttcccattttacacacagtgaaactgaggctcagatataaaggaaaggtactggcttgaagtcacaaccacgacaggagtaaggatttggaataaggatttggtcctgttttctggaccaaatccttactctggctctgcttacactttctctccatcaccaaatccttactccaaatccagaagtcagagccaactcccatcttggttctgacccaaatcctgctctggactctggagaggagattgaaatataattgcaccctcatacacatttaggaaatggttaagaagtgtaaactgaacccttatccttgtcttcaatcttcctccctgtagacatctatcttattatggttattattcagaaaacccagggatacaggtttgtcttcttactttgataactcttcttagtttaaaataataataataacacatctttggtcatctatgtcacacaaaaattttcctttgtttgcggggggctggggatgcagtgttttttggggggtcttggtttatgctccctgcccttgagcccctcagccgtttgccctgcccccacctcggctccatggtgggagggggctctggtcttttctaaagtgggcggtttgtcttttgatctttcccttttggatgtgcgtgtgtgtctgcgtgtgccatgtgcgtggcacgcatatgagtgtgtgtgcgtgtgaacggctttgggtcctgctggttttgctgtgagctgcagtgttctgtgggtctgtggtatctgacactgtggacattaatgtacttcttggacattttaataaattttttaacagttcaacctgcccgtcaccacctgataccttcattcattcattcattcagcaagtatttacccgagcagctattgtgatccatgtactgtactgggtgctggggagatagtggtgaacagagaaggtttggtctttagtgggtagtcacagaaggcttccccgaggaggggaatggaatctaaagaagaagtcgcattaactagatgaggagagaaagaaaggaaaggcattccactcagaggaaagagtgaaagcaaaagtcttcttgcagaagggagcgggcgcagtggctcatgcctgtaatcccagcaccttgggaggccgagccaggcggatcacagggtcaagagatcgagaccatcttggccaacatggtgaaaccctgtctctattaaaactacaaaaatcagctgggcatggtggcatgcgcctgtagccccagctactcaggaagctgaggcaggagaatcacttgaacccaggaggcagaagttgcagtgagctgagatggtgccactgcactctagcctggcaacagagagagactccgtctcagaaaaaaaaaaaaaaaaaaaaaaagaagggctcactcgaatcagtaggaaaaagacaaatccattagccaagcaggcaaaagatataaaaaaaagtttacaaaaaaggaaatagcagctctaaaactacaatatagactcaataaaataatacacattttgcaagaacatctagattcacaaggaaggacataaaaatataagagaataaacaaatgtatcaaaagatggccagcatggtggttcacgcctgtaatcccagcaatttgggaggctaaggtgagcagatcacatgaggccaggagttcaagaccagcctggctaacatggtgaaaccctgtctctactaaacatacaaaaattagccaggtgcggtgatgcgcacctgtaatcccagctactcaggaggctgaaacaggagaatcgcttgaacccaggatgtggaggttgcagtgagccaagatcacaccattgcactccagcctgggtgatagagtgatctccatctaaaaaaaaaaaaaagatccttgcatatatcaaagatgataatgtgcttgaactgtgaatgatttacgatttgctcgaccgcctgcacctaaggtcaaagttggtggtggtggttggagatgttcaacctcacaaatagaaacgcaagcaacaaccacattgagataccatttttcacctatcagattgacaaaaataaaaagtgacaagacatgaggctaatgaggatgtgtggaacaggtgagtacttttttttttttttgagaaggggtcttgctctgttgcccaggctggagtgcagtggtgcagtctcacctcactgtaacctccgcctcctcagttcaagtgattctcctgcctcaacctcccgagtagttgggattacaggtgcctgccaccatgctgggctaatttttgtatttttggtagagatggggttttgccatgttggccaggctagtctcgaactcctgacctcaggtgatccacccgcctcggcctcccaaactgttgggattacagccgtgagccaccatgcccagccaggtgagtatatctattacctgtggagtataaattggccccatctctaagaaaatgtggaaatcactatgaaaacggcgagttttagtctgggcacagtggctcatgcctgtaatactagcaccgtaggaggccaaggcaggtggatcacctgaggtcaggagttcgagaccaacctggccaacatggtaaaaccccatctctgctaaaaacagaaaaattagttgggcgcagtggcaggcgcctgtaatcccagctactttagaggcttaggcagaagaatcgctcgaacccgggaagcagaggttgaggtgagccgagaccgtgacattgcactccagcctgggcaataggagcaaaactctgtctcaaaaaaaaaaaaaaaaaaaaaaaatggtaaatggggagttttgaccctttgaacaaacagcttctttttttttttttttttttgagacggagtctcgctctgtcgcccaggctggagtgcagtggcgctatctcagctcactgcaagctccgcatcccaggttaggccattctcctgcctcagcctcctgagtagctgggactacaggtgcctgccaccacgcccagctaattttttgtatttttagtagagacggggtttcaccatgttagccaggatgatctcgatctcctgacctcgtgattcgcccacctcagccttccaaagtgctggtattacaggtgtgagctgccgtgcccggcctgaacaaacaacttctgatatcatcctccagttatacttgaacttgtgagtgatgatgtggatacttacttctagcagaaacatattgagaacaatataaatgtccaccattaggaacctgactacaaaattatgatgcattcaatccaaaccattgatcctcttcagactgtcagaagaatgaggaagaggagatttacttatttttattttttgagacagggtctcactccgtcgcccaagctggagtgcagtggtacaatcatggctcactgcagcctcgaccttctggctcaagcaatcctcccaccttggtctcttaaagtgctgggattataggcatgatccactgtgcacggtcaggaccttacactattttttctcttcatgctttgttgtatcctagaaacttccagtgcttcctcagcccctgccctcagcccacatattcatgtcagggaaagtttgtaatgtctctcccttcctggtacaggaaccccccttccagtttcccgaatttcatgccctggatcttgtcaatgacccagtcaggacagagttgacaaggagcagacccatggtgggtggctaaagggagacagtgggcacaggatgggggaagaaagaggagcaagagattggggaggtgggggaggaatgaaggaccccacttccaaagagaataaaaatcaagcccggccaggcgcagtggctcacacctgtaaccccaacactttgggaggccgaggtgggtagatcacctgaggtcaggagttcaagaccagcctggccaacatggtgaaaccctgtctctactaaaaatacaaaaattagccgggtgtggtggcaggcacctgtaatcccagctactcgggaggctgaggcaggagaatcacttgaacccgggaggcagaggttgcagtgagccaagattgcacgactgcactccagcctgggcgacagggcaggactccatctcaaaaaaacaaaacaaaaaaaaccccaagccccccaagcttgtaacatcttatctaccaaagtgcatttatacaggaattacccactggctgcctcattttctcattcatcaaaagaaacaaggatttattgagcccctactgtatgcttggcactcacggggaccacagaacagccctggtacagtgggagaacacaggttcagaaggagtttgtcacttggtcacacagtgagcaagaagaggcagaattcaaacccaaaccgacctggtcccaaaactcagagataggtttcctagagatgacgtgacagtaaagagggccccagggggaccccagtactcctgcaggcaagacttcgggactggggtctcccacggccgggatggccttgtccatggatcatgtccccccagctgcctgtcaacgccgaggacttcggctgggtcctgacctcttagcacagatcgccgcttagagcctggtgggtgttgaattttaaagaacattccatccctcctggatctctaaggagggaaatgtgggtgggggtcagggaaggagagaggaactgggtgagaatggagatggggtctcagaggacaaaagaggagctcagtgcttgcatatctcaacagaccagggcacgccataggctcggtttcctcatttgtaggacgacgacaaacatgcccgggtgttgcaagattgtctcgtgcacagctgctatccggcatagagttaacgtgcaaacggagggtggcttagcagctccagaagtccagccctgtctggggaaggggcagccatcaggcccctgatggggtgcagtagggtagccctagtaggaggcacccaggacttctggcccacaatgagaagttcctgagaactggaagtctggttgtcatgaggacaacgttgacagtctctatggcaacagcttggtgaacagggccccgttgtccacaaggaaaagcctagggggacaggtgttctgttacctcggactccagagtttggtcaccatggcaacagtggtggggtccaaaccgcctgggggtggagcatggagggtggtctggaactggagtgggcctggggacagggacagtttgtttccatggtgagagccggagaactggatgttgggtcaccctggcgacagcttcggggagggtgatctccatggcggtgagtcagggtagggacagccagaagttgaggtggaggtctctggggtgggggccaatgagatgagaaatgtgtggtatccatggttacagctggaggagggaggcactgtcttcatgggtgtgcctgatgagggaaggggtgtgtgactctaggtgacaggtagcagcaggactggttgccttggtgacagtgggacccaaggcaactgctctgcataactagtgacatggatcttaccggtccccaggcctgggaagatggtctgtttggtgacagttgggaaagggacgtcagaggacagggtgggtttgctctcccttcaaagaaatatctgaggggtgggacgtggcccccagtaagtgagccagctggctgtgtgtcagtctgaggtggcagatgggggtgctcgcccatgaaactagaggggtgtgccctgttacccagaaactgcaggggactctcagggagagggggagaatgggagtctccaggactcaggtcaccataagggaaaataagcgcctcggcccacaacctccatgtgaccacggggagtgaccctgaagttcctgtagtctctccaggtgaggaggagggggaggaggaggcgcccagtgtcccacgtgaccgcaagggactagtgttcagtctccagtgagatgcagaaggtgtacggccggtctctagtcaatcccgggggtccagccaccaggcgaccacgggggcagttggtctgtttccaagtggtctcaggaggcgtggccagtcttcaggagcctgcgggttctgctggcctcctgaggtcctcagggggcgtgaccctcatggagaaagttggggagttgggggaatcctctatccagaagaggtgagggctggccaggctccagggaactccaaagtactgttctgccaggactagccagtcttcagggaccccaggggcacagttagtttgtaagggaccacagggaatgtggccagtgtccagggcttcaagggcgtggccaggctccaggggaccacagggctctagaccagtggtcaagcgccctggctgtccgcctactcccagcctagacgtgcagaggggtccaggcagcaggatcgcgcgcgccccctgcccagccgccgccgcccgcccagccccagccccagccgccaggtgccgggtccggtgctcctggagcgcggtagcagtagacgccgaagagccgtcgggtggcgtccgggaagccgaggctgcgcacaccaggcctgcggcctccgcagcgcgctcgcgggttcacgatggggtagcgcgcactgccatcggccagccaacccgcggtgcagcggtctagcagctgcagcttccacgcggcgaacagctgccccaccttggccacggccgcgccacgcgcagcacacgcgcgcgcagctccggagaagggtacaggtcgcagcggcttcaggaagaacacgcgccctgcgggggtgaggtggggggtgggttattagtgcggctcctgggaccctgcttcggtgggattcaggactgccccccgcatgcagcctaggactctggcctcggccccgggatccaggaacagttcctcctttgcagcctgggaccccagcctaggcccaaccagcgttggtaccaggcggtgtgtgctgcgcctaggcactcttgggagaggggtctcctgtttctgatcgctaagagctgggtggggaagaaggccccggggttggggtagtgttgcagcagaggccagtcttggggtgaggcctacgcacccggcaggttggacgtgaagcagaaggcgtcgtagcgttcctcggcgttatggcgatacccgtagttgcgcaggcccccgttggcatcaccgccgccccctgcactcccggtcccccccaggccgccgcagggctcccggggccggttcacggggtattgcactgagccgtcgcgcaaccagcccgcgttgcaccagtccaggccgtcgcgccaggccgcgtgcagctgttctgcagatgccaggatgccgtcctgctcggcgcacgcgcgctgcgcctccgcgaaggtcagcttgtatcggcctccacgggggtggtagggaaagaccacgcctggcggggggcgcacgggatcagcaggtacaccccagcccaccctcatgcacctgacgtctggggtgctatgtgactcttcaaccgggacctttcagtccattcctcctcactctggcctcagacctgaccacgatcctccccagctcacaccccatatagctgtctcccttcactttaagcttgggattcacttgaccctcccccttaacatactatttgtgtccatccccttccacctctggaggactttgctcatgctctttccaccttattctacctgttgaactcctattcatccttcaaaatccaactcccaaaccctcttccattgagtcctgtgtgcctctgacattccgccagtactgggtccctccctctggtccagccctgagcccacggagcctgcgttcagtgctgactctcctagactaggaccccctggaagattggccctaggtgaagacccctttgattcccccagcattgtccaagggagtacccactgggttcccttctaccttcagttctgatgactttggaacttgtccctcattggactcacagtccgttcagctcaagtattttgtgtgtctgtgtttgagggacgcgggttgggggtgagtggggtaccctggaaagaggcagacagggtccagggagaaggcctggagctgacagactggggattgaatcctgtctctgccaccaactagcactgtcctgggcaaggctctaacctctctgagcctgttgtccatctgctggtaatagctgtctcccttggggtttttaggaaattaaattagagactcctgagaactcttcaactaagcacctgccacagaaaatgtccagtaaaggagagctgctgctattattgttgttatttgttattgttagggaggtcagcaagcaagggccctgaaatctcacctagaatcttctaaagagaactggaaaaggccaatcaaatgggagggaattcttcaaatagaaaccccacctcccagctccagggtgagccaatcagagcatcccatcttccagctacagtgattggctcacagttgggcacatgactcaagctgagccagtgagggacaactctgggactctagctgctgctcctaggaaatcagttgctaagcagggaagtgaaagcctaggcactgtggtcttggttccagaaagagaagcctgtcggaagaaagcctacctgggaagcagagcagaaggatggttcctgacacggtgtgagtgcctggatctcactgtgcctgaatcctatcccaggacttctcagtgtcctcattgtggacattttggactggatcacttttattttattttatttatgtatttatttatttatttttgagatggagtctcgctctgtcgcccaggctggagtgcagtggcacgatctccactcaccgcaacctccacctcccgggttcaagagattttcctgcctcagcctcccaagtagctagaattacaggaatgcaccaccatgcctggctaatttttgtatttttactagagatggggttttggcatgttggccaggctggtcttgaactcctgacctcaggtgatccgcctgcctcaacctcccaaagtgctgggattacagtcgtgagccaccatgcccggcctggatcactccttgtgggggactatcctgtgcctggtaggatgtatagctgcatccctggcctctacccactaggggctagtagcaactgccttctccagatgtgacaacgtaaaatatctccagacatcgccaatgtccctggggaggaaaatcacccagaaccagatatgggggctctaccccaaccaaccttctaaatgcctgcaggccaacttgatttggtttatgtcccttgccatccccgcccccctccttcctcagaagcaaggtttatcctccccaccggctgatcaccttccaggtccagcttgaccatgccagcgtcatcttccagctcattggtgacttcgcactcatagcgcccgtagtcttgcagcgtgacgttgcggaggaccagggaggcatccccaggcccgtcgccctgcagctcagcccgcccacggtagctgccgaatgcccggtgctgggggcctagtgccacgaagacgtcggtgaaggccagcgggtccaccacctttgtccacttgagccggacgccgtcgtgaccgtgggcggctgcctcatagtggtagcggcagggcaagacgatggtgccaccacggtggcttaccacctgcccaggcgctgtctgtaccactaccgagcccgactcaccctctgaggacaaccaagcagggttcagaggaggggcctaggggcagaagggggcctctggggaaggtgtctctggggaggggaacgtgggaagactcgggtgggggtcggggaatcagaagggtccaggggctcagggagagggcgaggggctcagatggggagtggctgggggaaccgcggacgtcaggaacgccctacccgctacccctctccgcacttggccacttctgcttttcgcggagaagaccacttttagcggccctgactcacccagcacgtgcacgaccttcttccggccacgctgcgcccccgcaggggctgtgagcagcaggacgccccaggccgcggcccagagcgcgccgggaccgagggccgcccgagcgcacacctggggggcgggcacggggcgctcagtccagcctcccagccttggcttttcggaggcctggctccctcccgggcctgccttccccacagcgaggacctctctcacgcccatgtccccaccctttccggggtcctggagaactccccctcctcctcttgggacctcacatcctagcttctgcaagaacccacgcccctagactcccccccgccctcagtcctgccccagatcccgcctcattcccccccaccccaaaacccgaggctcgctgccccgcccccttctggccctggcccgggccggggataggggggtggggaagagctggaggagcggcggcagcaaggttatccgtgcgccaggagactgcagcaaaccgggccggggcgggcagggaggggggagagctggagagaaagagggagagacgcggggagagaacagggacagagagaaaggcagggagaggcagagaagagagtgcgcgacacagaaaaaggggaagggaagagagagaggcagagatggagagggagagacagatggaaaagaagagacagatgtagagggagagacagagatggagagggagagacagagaggcagagggagagacagaggggcagaggaagatacagagatggagagggaaagacagagatggaaagggagagacagagaggaagagacagagaagcagagggagagagagagaggcagaggaagagacagagatggagagggagagacacagatggagagggagagacagagaggcagagggagacagagaggcagagggagagacagagaggcagagggagcgacagagagggagagggagagacagaaagggagagggagagacaggagagtgccagaggcagagagactcagagaagaggagggagagatagggacagggaaagacagaaacggagaggagaggaaaaaggcagagaggatgacagagatggagagaggcagggagaaatggagagggagagaacctagagtgccaaaaagagagatcaaagagggtgagagacagagaaaaggaagagacagaagaaactcagagggatatagattcagaggcagagagatatagaatccaagattggggagacggggcacacaccacccgcgcccgcagccccacttaccatcttgcccgcgcggcccccgccgagcggcccctacgcacccggactgcgctccccgcacacccggttaagactgggcaggtccctgcaggcggcgcaatcccggcgtctgcctgcaaggggaggaggaaggcgggcgaggcggggtgtattaaaggggccgcgggggcccacgctcccctggagcagtggctggagcgcgggcggagaaagaagcgctctggacttggagtgcagagctagttccctcaccctgctagctgaacttaggccagggaagaacctctctgagcctcagtttaaccatctttgaaatggaggagggggctgagtcttctatcttggttactgtgctttggcaggggacctgggggatctggtgaaagagatcatttggcctgcaggccacctgtccattgggtagtcatagtggagtcctggtctccagcaccccaaaggcgctccctgtgcagggtgggggcctcacgatagtcacactctgctgtggactggagccacaggccccaattcaagtctgcccctcactggctgtgagaccttggaggagacagttggcctctctgagcctgctgctgactctttggtgaagatccagtagctagacatacagtagatctccggtaggggttgggaggggcaagaaaaagggacatctaggccgggcgcggtggctcacgtctgtaatcccagcactttgtgaggccaagatgggaggatcacctgaggtcaggagtgcgaggccaacctgaccaacatggagaaactctgtctctactaaaaatacaaaattagccaggtgtggtggcacatgcctgtaatcccagctactcagggggctgaggcaggagaattgcttgaacccaggaggtggaggttgtggtgagccaagatcgtgccattgcatatcagccggggcaacaagagtgaaaactccgtctcaaaaaaaaaaaaaaaaaagaaaaagaaaaagaaagaaagaaaaggaaaagggacatctggtcaaggtccctgacttactccaggcccaagtcgcccctaaacctggcctttcacccaatttcaaaaaatcaaacaatagcaaacagtgagtctttctcctaacaccttggcttccttccaggactcagtttcccctaaaatgagcccaacccgaccagataggagaggcagagttgtggtttctgtggtccaacaggctggggctccatctcttagctcagccatgccttggggactgagcgggggaatgatctcagaccaggaccttcacctcctgcagccttggtttccccatctggaatatggagtgagatccagcatgtagcagtcaaggtatacagtaggtgcttaataaatgtatcatgctattagttatgatttattggtagagcaggaacttttctctctggccatgaccttgggcaggtctcttgtccatactgagcctcggttttcccatctggaagatgagccgtgcataccaaccagaggccgccttctgctatcccagcacctctcactcctggcaaccacgatggcagtgataggtgggccctcatgggggccaagaagaggatcccttgcccctgcaccctgaaacacttaggcagtgatattttggaaattgaaagggtttttactgaaaggatccatggggggatgatgggtaagttctggaaggggtagaagcgtttgtgtgggagttggagcatggtgacagctgtgggaggctctccttgcaggaacacttggtcgttggtctccatcccacccactggactgaaactaccatagccaagactaaagacacccggagatgtccctcctgtctctaaaacacccaacccccgcttccccaggtagggctgactgggcacgtaaacagagtcctgggtcctgagtccacagctctctcaatgctgcttcttgtggagggctagggggtcggagggtggtggctggtggaagaatgcgggccactgaaggcaacggtaggccagcaggtgggggcccagcgcatacagcagattgcacacgaagaagcagccccaggtgtcctcaggcacacggtaggtgaagggtgtgcgcaggtgcatggaagcccccatgtgcgagaactgtgcctggtagccagacagggaagatggatgtcaggggccaggaaggaactgaaatcccagcatcaccgacagccccccaggtaggtcaggcagaacccaggggatgcccatccccacctctcgggctttgctcatctatctgtttcccatctccagtccatctatctgtttttttttttttttttttttgagacacagtctcattctgttgcccatgctggagtgcagtggtgcaatctcggttcactgcaacctccgctgcctcctgggttcaagtgattctcgtgcttcagcctcctctgagtagctgggactacaggcgtgcacctctatgcccagttaattttttgtatttttagtagagatggggtatcatcatgttgcccaggctggtctcgaactcctgaggtcaggcaatccatccatcttggcctcccaaagtgctaggattacaggcataagccaccatgcctggcctatttttaaaatttctatctatctatctatctatctatctatctatctatctatctatccatccatccatctatctatctatctatttagagatagggtcttgctctgttggccaggctggagtgcagtggcacaatcatggctcactgcagccccaacctcctgggctcaagtgatcctccaatctcagcctcccgagtagctagcacagcaggcacgtgctaccatgcccagctaatttttgtactttttgtagagacaggtttttgccatgttgcctaggctggtctcagactcctgggctcaagcagccctcccacctcggcctcccaaaatgctgggattacaggtgtgagccacctcacctggccttctgtctgtaaagattcctgcccttacatgtcctgtctgtccctccctgtgcttgtccacttgtctgtgagtcccccccaacttgcctaaccccatctcctgggccctgcaccccatctctctctgacctggctccagatcctcctcccagtcttccccaccccagaggtcttggcacaaatcctgtggattctaaatgttttcctggtccctacttccctggccggggcccaggatttagcacttttcatcaggaacccagaaaaaggctcctagctctgactgggcccctcactgctcaaactcctcctcaaacgccccatcaccctcagtacaagcccctagtcccagagttcaaagccttcagcatccagctgccaatttctcttatctgcctttacctgggttatggccctgctaagtcactctctccctctgtgcttctccttgtgctgttcccattcctggaatgcccttccctgcctggagaactcatcctcgtacatcaaagcctagctcctatgccttgcttctaggaaacctttcccctctggaatccttcacagcccctgtccctattttcatggggcttggagtgtctgtatctggctttgtctcccctagactagggaatcctgggatattgggcctggggctggggcctcttgggggctcatcattacagtgcccagggaggacaccaaaggcattgatgagtagacagaaattccctcccacatgcctgctcacccacccatccgccacctcacctggccgatgcctccagcaaacaccaaggcccagtctggaagccaggagcaaccagggaaggtgagagcataggcagccaggccgcagaaaggcaggacataaaacatgtacatcagcatctgcaggggcgggaggagaggggcaccagcctgtgagatgagcagctaccccaggtgggtctcctgagacccctgaggtggaggccctgaggaaggatctggatggcctcagaccccacccaggctctctgcaaagtgctcctctatttcccttggggatccttgcccccaacccccgaacacatacaccaaacctactaacctttctctgaaagtggcatgcgaccctggcctagccagtcggagcattccagccccctgtccatgatgctcagtaagggatgggcaagtgattcacgctgggccaatctgagcctgcctaagacttgtgcttaagctcgggggtaataagggctcacattgctctggggtggctgagtggggtgcatggaagcctgaagctgccacaggctgtctctgccaccccataaagggactgcctgagagtgaagccatgcaaagaaagcagagctcagaggccgggcatggtggctcatgcctgtaatcccagcactttgggaggccgaggtgggtggatcacttgaggtcaggagttcgagaccagcctgaccaacatggcaaaaccccgtatctactaaaaatacaaaattagctgagtatggtggctcacgcctgtaatcccagctacttgggaggctgaggcaggagaatcacttgagcccaggaggtggaggttgcagtgagccgagatcatgccattgcactccagcctgggccacaagagcaaaactctgtttaaaaaaaaaaaaaaaaaagaaaaagaaagaaagaaaagaaaggaaaagaaaagaaaagaagagcccagagtctgcaccttgagcacctggatccagccatacctgaagaccacatctgtccttttttggtaggacagtaaattccatatgggcttctgcctgtttgagttgtgcttctggcacctgcttcaaagaggcccagtggacccctacccatggcaggggtgtggtcttctccccgctcccctctcacctgcaccttagggtaggccacagggtcccgcaggtatggctcatactggtagatatagacaaagcaggcatctgtggggcaatcaagcaccacctggagcagacagacataccaagaaccctcagacatacctcccacaggaagcctcccccaccctcccaggcccacaccccttgctctggcctctcccagcccagctcaagttgggctggctgggagaaatggggctttgtcatggaacactcaggttagacttgatgaagaacttccttggatgatcaaacaggaagggcagtgtgggagaggtgggtcagggaagggagactggtggcaggggagggggagaccaaccagcgcagactcaccaggccccggaacagagtgaagaagccagcaaggatgagatatatgacaagggccaggtcagccggacgctgcaggagtccctttctttgttcctcttgcacctggcccaggggagagaaacagacagcatgagaggtagtcaatgacaagtattcagtaggtactcaataaaggttcctaaggctcctcccttctttctttttttcttttttttcttttttctttttttttttttttgagacagggtctcattctgttgcccaggcttgagtgaagcagcacagtctcagctcactgcagccttaatctcctgggctcaagtgatcctcccacctcagcctcccgaatagctgggaccacaggcatgcaccaccacatctggctaattttttaactttttgtagagttaaaaaatctggctgtgttgcccaggctggtctccaattcctgggctcaagcgatcctcatgccttggcctcccaaaatgttgggattacaggcatgagccaccgcacccagccctcccttctttcttgtgacaaaggagaaccttccacagaaattaagtctttgaccaaaagcaactgacacggggaaagttcaggcacattgggacaaggcctaagaggggtaaggcactcaccatgttggcggtgcagcgggttagcgcccggggctggctgaagaccttcatgccagcccagcatggcaccagcaggtaggggatggtgaggaagaaggcaggcctgatctcggagctgtatttgccttccatggtgcaggagagagggcatcagccatgccagaaccctgctggacatctgtttgtttgtttgttctgagacagagtcttgctctgtcacccaggctggagtgcagtgatgcaatcttggctcactgcaacctctgcctcccaggttcaagcaattctcttgtctcagcctcctgagtagctgggattatacctggctaatttttgtacttttagtataggcagggtttcaccatgctgcccaggctgatcttgatctccacggctcaagtgattgatgaggcaggtggattgcttgagccgagagttggagaccagcctgagcaacataaggattacaggcatgagccaccacacgtggcctctctggctggacatcttgattcagaaataccatcctcattcaagctccaccaccttccatggctccctagtgcccacaggatgatgtccatactccttagcctagcctgcctcaatttaccttctgaatatggatcctaccttccagtgggttctttgcttcctacaaatacaccttgagtgttccctttgctgaggttttgccatgccaacctcccagactgccttcactgctctacctcccaagacctacccctgaagctttcaccctgtccccaagattcaccctaaaattcccttcctgtgtcaagaccattctgggtcaaacccctggggctgggaaccattgcctggggaggaagcagagttgggttctcccgccttccaagaggaaacagggaccggaaaggggtgggctgctgactgaggctgtggacacgcaaagagggaggtggggcctctgcagacatcagggaagggatggaggatccaatgggggtgcttctaggtgcagggcagtgaccaagcccaagagaacctggatttcccaaagccttgtccttaccaagaatgtttcctgtaaggaacaccaggatgctcatggcgaaggaacccagccagtagagtccaaaattccggtatctcttcctgagcaggggatggaggggtgaccagcaggtagtcactccgtaatctcagagccccagccagggcctggagaccaccgtgggtttcccagctccgggtccctttcagttttgcccaggatggaagggacaacagggagttgaacggggaaataacagtgagaccctctgtccaagaacagaagtggctgcccaggcacagggtggatgtaagcaatgctaggccaccacctacacctgagacgttccctggaaccttctcctggccacccctggctggagccctagagaggcgtcctgatttctcctacagacacttctggctccaccctgccctgggaccccatctgaggatgcaacttctctcccagggtcaggggccaccctctccctgcctcctgcaccttctgcagatggcgccggccatggccaggtagaggaggtagtgaacagtgccatcccagtagcagatgaagactccgtgcgctgtgcgcaggtatggctctccctgtgggggcaggtgggagactcagacgggcagtgcggtagggggctccctggtcgtcccccaagtacctccttggtgtagaactccatgaagcccaccacatagctgtcttcctgaagagcgatgatgaggtccacaaccgaggtgaaggcgaagacagcgaagactgcagtgagtgggcgggccgggtcaggtgtgggaggggacacgtgtgggtggggctagggcttagtgtgggcggggcttgaagttaaggtcagggatgagattattccaggcaaggactccaggcccagtccctgccccaaccccaaaggttgcatgaccacagtcctgcctcattctgcatgtctgatggaggagacacagcctggctctcagaagtccctggtttgattcagaggcccagtgcctgcctttgggagtccccagtctcatgggagaggcaccgtccctgccctcaggagatctcaaagtgatgaggcagtatactctttttcaggagcttctaatctgatgcaggagatgcagtccctgttcttaggagccccagctctgaagggggaggctctttgaggttccccagtttaatgggagtgttcaaatctctttgaggtctccagtctgatgggagctcttaaagggcccccagtctgatggaggaggccccttaatggcccccaagtctgagggtggaggcccttgcctggacagtcttcttccccacagcttcccactgactcaccagcatagagtgggtcataggagacctcgccatgggacaagctgtagaccgccacgaaaagcagacccaggattagggcgctcatcaatgccacccacagggggctgtggagagggaagccaagtcagggaggccaggcccagtgctgaggcatcgccccactctccctggtgggggaaggggcagactcctggaagccccaggggaagagactaaagtgtctgttcatccatcaatgctgttccctgaaactgctctcaccctgtgccaggcccttgctcaggctgtttcttccttctggaaaccgcttccagaagtcttttccacttggcaaactcctactcatccttcatggcccatccacattgttcttcctccatgaagcgctccctgactccccagaaaggatcactgtttaactcgggctagctacagaggggatattcatcagcctgtttctttttctcttttcttttctctttctttctttttttctttttctttctttctctctctctctctctttctttttgagacagagcactgacacccaggctggagtgcagtggtgcaatcttggctcactgcaacctctgccttctgggttcaggcgattatcctgcctcagcctcccaagtagctgggattacaggtgcccaccaccacacccggctaatttttgtatttttagtagagacggggtttcaccatgttggccaggctggtctcgaactcctgacctcaggtgatttgcccacctcggcctcccaaagtgctaggattacaggcatgagccaccacgcctggcctgccccttctgactttaccatttatcccatcatttgttatgtgtttgactcagtctgttcagtcattcgacaacgtcaagcccctctgtggccaggcccagctcccaagccacagggtctcgagtgctcagttctgtagacttcattgtctgacgctcccagctcctcccagctaaagtccaaatgcctctattaactccaccctacccctgccctgatctgcacccacaacctgataagacaggtcaaccagttgcatagataacagaagccaggtctctgggcagccctcaacccaggtgggcaaatccaggcccagagaggatgggagtactgtccagttgtccagggtcacactcaagactctgtccatcactctccaggcccctattttctcatgatcccctcagaacccaagatttccatcctgaccccatctaacaatgacattatagtactcagatgagaccaagacaaatctttgtacacagtttataatccttaaccgtaactatgagatgagatctaggatcgtgcccattacactgatgagggaactgaggctcccagaggaacttggctcacccaggatcccaggagatggagatgggtattcccacccagggagccaggctcatggttaagactctctccaccccatggcttgggttgagctgggtttagaagtacgaggggcttgcagatgcccactatccggtggctggacccacagggctaggatctagggttaggagacagggaccaggaaagggaaccagtagggggaactgagtctagggacatggttagccagccctgaacaagaggaaagtcacaggcctgagacaggcaatggagtagggtgtgtgtgtgtgtgtgtgtgtgtgtgtgtgtgtgtgagcaggagtcaggtacccggggccttatctgggacaatacttttacccttggtgactttggaacctaggcagggcgcatccctgggaaaaccccagaaaccctccaaagctctggcttgtggggactcatcattccttcttcccaggccacaaacatcccaggagcggccgcatcccagcctccagcccggcgggaaggggacttccggttagaggggggtgttcttctggcccaccccaatcctgccgggtcggagctgagctggggcgcagggctcgcagaagccaggtccgcggaccgcgcatcctccctccagcccacctccagtcctccccgcccccgcccgcccccactgtccccaaggccgccctggcccctctccgcacgcactgcgagagcgccgagacgtggttgagcgcgtaggacaccgggagggcgctcagcgacagcgccgcgatcttgccggccagcggcgggatgtccatagcggcggctgctggaccccggctcagccccgacgcgttctccagggcgctcggctcctcgttggcggcgagtccgggccgaggctgccagggacccgccccgcacaaaggtcgaccccgctgcgccctgggcaggccgccgtgaccgccctgcgtgttcccagggagcctccaaggcccctccccggccctccccctggcagctgccccgccccttcgcccctcaccatcgacaccctcgtctccaatggccgtcccgctactcagcctcagtttccctcactgtcaaaggctgggacacaacacctcgggatgcttctgctcttaggccaaggggtgcgccctggaggtcctggcgtgccccctctttcccctgcctccacaacttcgttctaaggaaattttctcctggactctgcgcttctaaacctctgcattccccagagtttcccatccccacccaaagatcaagtcggcattccctgtgcgcacggatggagcaacctccagctcttgggtgcaaaatgcctttcagtgggcttagatttgagttttcataaggtggccacaaatgtaaacgtgtttccaggcaggtgtgaagtttttttgtttgttttttgagaggtctcactctgtggcccagactggagtgcagtggccctcctccttgaactcccagcctcaagagatcctcctacctcagcctcccaagtagttgggactacaggtatgcaccaccacgcgcagctagttattttttgtaaagacagaggtctcacttttttgcccagactggtttcaaactcctgggctcaacagatcctcccacatcagcctcccgaggagctgggattacaggcgtgagccactgcgaggggtctttaagtgtgaggctttgactccggggctgtccctttgcaggctagtcccgggtttagggttcttcatttcggggagagggtagaaggggtcctagcgggtgggggctgaagttagaatatcgggatggagccagtttggtgaagagtttgggaacggtgttcctggcagggaggaaagtggctcaggcttggaactgagcagtggaaaggaggtcggttctgctggggtgtgatgagaagcgagacagctgtgagaggctgtgggaggttttgaacagctgggagggggccacagtattgggggggagaataaggagaccatctgtctttgtcaccccctccaaccagactctggcccatgtggagtacttgtggatgctgcagacagcaaggtgaaccatgcccacctgacgcctgccctgcgggaccccagtctgcagctggcacaaattctaaccactgcccctacctcaggccccattctgcacgcagccccttagcttgatgccaactgggtcacaggtcttcctgaactgggccacaagagggtcttctggccgcaggtctgactcagcctccttccccaggtgtccactgcccatgggtgaagttcaggttcccctggactttccccaactctagcagggtcaacaccccccaggcctgctttctgtctgtaaaatgagccttcttgtaagcgggccccagcatcccctcctccaggcagccctgcctgccacccccaccccaccttctccacacaaggccagggtgcctgtgcccagctcagcctaggggcttggccttgtcccgtgtacaggatgcacctgcacacgcacacagcacttggaggcctcgtcccctggcaaggggtaaagtccatgccctgagcctggtgagcctccaggttgctgagaactgagaagtgacttggatggctgaatgcctgggacccagtgccaggattccctgaaccactggctgcagagaactaccccgctgtgctcagggtcctggcccactgccttctgggcagccctcattcatgggcacccaggccaagcccaccaatgttactctttgctctgcctcagccacagcgtcaggaaagaacaaagggtggtatatcaccccagccttggctctgccactgcatctggcacctccctggtctcagaccccactgagacactctgcagaccgccccaccacggctccctggttcctctcagtagcagcctcagacctcatccccagcagcctggctgactggagtagatcttgtccacctggtccccacacttggcacctagtgtttgctgaatggctgtgtgaacacaagctggcccaggagcccgactccatgccaagcatgtgaatagggagcccctggtgcctgcaggggctgggcagcacccactgggtgtgtgtggagggggtgggggcagatggaaatgcaaattcccagggccctgcccaaccagctgactcggcagctgcagcttaacaagatccccagggtgacttaggcacaaatgtggggctctggccctggggcagatgtgggggtcttggcacacactgtggcctgggctaccctcctgcctcaaaacctccggctctgaggcccttccttctaggagctgcctgacatgttggcatggcacatccatgcatccatgcggctgtcccctaacgacacaagccccagggactcgtgtgcctaccacactggtgggacctgaagggccacagccaacacctgtgtgctgggccgtgccagcaccacctgccaggagagcacatgggtgtgcccagaagccacctgcccccacaggtctgagggaaggtggggccctgcctggagacccctccccaacctccctctgcagcacagtgctaggctcggaggttcctgacattcctttagcccaggtgtggccaagtctccagctttattattattattattatttgagacagagtcttgctctcttgcccaggctggagtgcaaaggcgcaatcttggctcactgcaaccgcttcccaggttcaagccattctcctgcctctgcctcccgagtagctgagacgacaggtgtgcaccaccatgcccagctaattttatatttttagtagagacaggatttcaccatgttggccaggctggtcttaaactcctgacctccagtgatccgcccgccttggcctctcaaagtgctgggatgacaggggtgagacactgcacctggccttccagctttactatgctgaaaacaactttcttcctcccctccagtgcaacccaggctgagcggggatggagactccacaggccaataaggagagccccgagacagcatcttgcatcccgctgctaacaggaggggcttcctgcaacaggaccaggcatctgtggtggatgagcactgggactttattacacggcacggcactcgtgacaacggaaggggtgggcagaaatgcaggccggaacattccacagtccagggacggttggtcattcagaaagtatgtatttccagaacactcagtagtaaggccgtctgggattgttctgtggaaggcaaaacagataacaggaggaggggattagcactaaagacagcagttcctcctgtctggaaccttccggaggcagctgagcccgcacccttgaggtggcagggcaggcttgggggacgggtgggggcttgaatgcaggtgggtggtagggggctcgctggtgagacccagcctggctggactgaggaaggaagggagccttctgttcctaccaccaccctctcctgtcgactgagcaaaggcagcccaggaggacatgcgtaccagggggttgggccggaagcggtaggccagcatcatcctcttgcggaacgcctcatactcgtcgtcctccttggagagctccgccggccggtcaatgccgaagccagcgccgtccactgtggtggtgcccctacagggagaagaggatgtgagcagggacctggggccagaactctggccggggggccgggcacagctgggctctcaacagcacctcccgcgggtgcagggctgggctgggacatatctgcacagagagaagcttgaacctgaatggtcaaggaggggagacccccggggcgggcggggggggggggcctaggccccagggtcccacacaggaaggaggagcccacagtgcaagttgtcgcagctcttgggatggcaggatggttactcaaggacagccttgaagggggcactcggggccagggtcacacctgggagagctcctgcccatctctgggagtggtttcgcactcatggggaattcaaataaggcccttcacaaggcagacaaggcctgacccatctgtaccctcacccaccccatctggcctggagatactcatgaggggacggaaggaggccctgggactggggaggacccagcccgtatggcctcctgcactgcaggcctgtgcctgacaaggggtgtgcagtggggtgctgtgatcattttgccacaagggaaaagcgatgacataaaggggtgggaatggggaggcggcaggggacccacagaccccaagttcatggccatgccctcccacaaggccacactcacttgttcactgggttcttgatgccctggccctctgagcccagcccctcgccctccttccagcccatcttcatcagcatctggtagccgatgttctccacagtcagcttgaactccttgtactctgagtagtcaggctcacggccctcctgcaaggtgaggaggtagctgtcacccaccagggctggggctgtggtggcccccaaatccaaccttctgcctttggtttcaatcagtgctgggaccagtggcccatctgcctccctctcaccagatcagactccttgagaacaaacagaccaagctcctcctgcttctcagggtccccggggccttagtgccaaactgtgcacccctggtggccaagtcaaaagggcaagaggatgagttacacaggccttatccacctgagataaagcaatggttcactggcaaagagaagccccgtgttcatgtcctgagagcaatttgttgtacaaggtactaataagagatggacaacgaggttaccacctcactaatgaggttatcaggccctgaacagttttataaaaaaacctcaaaaagataatgggggacgtgccatgtcagccctctctcctcaggagcccaacagcagcagaggcagaatgttaaactctggttctggagaggccagtccgtggggacttctgccggagaaacactttgcctgtaaactgcacttaattggctccactggaagcaaaatttcccccgcagccccaggaaatgtttctgaggcagcagctgagctgctgtttgctaattccctacacagacggcgcctgtcattaacagatgcctcctgcagcgaaaaggcctggctcctgctgtgatcgagagggtagccaggctactttgggcacctgcagggtgaggcagctacaggaggggctggcatgtggcagaggctggagctagggcccctcctggctcaccttcagggccttgaaggtctccataaacttttccagctcgtctggaggcaggaagtctccgatgaagtgcttgccccggcccatctttgtcagctgctcggcccattctgctcagagaagcagaaaggtgagaagagggagaagcaggaaggaggggagcaggcctggtggctcccagggcacaggtatgaggctcagtgggagcctggggcccccagggaaggaggcggctaggccatgaccccagcccgagcctctgcctggtgaggcagcccagcatttagtgaaccctgtgcagctctccaccctcacgatgtcaggactgctccttttcaccacggagaaaactaggccccagagagactgagcctctcactccaggcctcacagccacaggaagcaggctgggggctaaaccaggatggcagctcaagaccacgtgtggcgcatccaggtaaccttccagggcaggtgaggggggccatgcccagcccagcccggcccaccccgctgccccacatacccctggtcttatccatctccatgcgccgcagctggtgctcccaggtgcccagctcgctgtccacctcctcatcactgtcatagccgtgctggtgctgttggactgccttctcccacagcagctgcatgtcctgcatggcccgcttgtgctgcatgatcatgtcgtacatctgctgcatctgcagggcacactcgccagtgagccagggcacggtgctgtggcctgccggagccccgctcctgctccccgcctccagtgctgggcatcccccgccggaacgtggctcatctggacccctgggcaggactggagcaaggactctagcaagtactgagtactgccctgggttctctaaatcccagtgtggagcacggaggacctcttggccactgaatgagggtgactcagggtcctgacccctgggagggtcaagggtgatgtgacggggctgcgggcctggaggaggggtcacagcgagctgaccccagggactgacaggcaagcgcctgcagctcctcaggggagccaacaccgacactgcccaactacaactgggaggcctcaagtccctcagggtgccctgtgctgaccaggatggtcctgcactagacacgacagaggactgcggacaaagaacatcaacgtagactctcccatgggaaccagccctggagcgcggcgagaagcagccacaaagctcaggccaggatcacagaccaccggggccgccccaagggccagtggtctcccaggcaggctgagaggccactcaggtgcagtggggggtggcatgccacctactggggcagggggacctgcctgcctggaagcctccccgctggccatgggttccacctgaacacaggagcttggcgaagcacatgaacccctgtgaccgctgcacccgggggtagaggacaacactctatgggcgccgaccatgtccccgtccccttgtccccgcagtcttacctcctgctgctccttcagctgcttcttctgggcgtctgaaagctctgtgacgcccactagacccacaggcttccccttctcatagccgagccccttgaggtcctgaactggaaaccaaagacacagggtagtcagagcctgacaggtgcaccccgatctcgctcctgcgctggggtgtgctgtgagtctcacaccttcatgacactccaggcacacggggacctcatatcattactgtcagtgccacgtggtacgtgacggcctcggggtcccgctgtgtgctgccacgtgcacccccgcatcttacgtccttgtgacctctccagccaggctctacgcaccaccacattgcagatgtggacaccaagaatcagaggttccgggactcactcagggtcacacagctaacgagtgacagggcaggaatttgcagagccagagacaagagagctgagacggcatgtgggcagcatgcatgggcgcacgcacaaacgggctctcagaaggcagctccgttgctaacagacaccaggtgtaagcgcgcacagattcagagtctggcgtaagactcagctgtgcgactcccttagctccttcaggggaggcagccaaccatcctcagagcagctgacatttaatttggcatcagctgtggaacttggcaggctccagtaacactgacacatagaaagatgctgcaacagccccatccgggtggcagaaaccaccacccctcgggcggtgcggtgcttcccgggggagaaggtgagcaaaggggtgcagcgggccctctgggaagggaaaagatttgggtccttccagctcatcaacactcgggctttgccgctaagaatggcccacatttgcactcttagtccttccttggtttacagggcactgagggatgtgggggagccctgttggggagacgcaggagccgaagtctgagcatctggttgattgccttagagcatgcccacagtccctttcccccaggcccactccaccacatgagcgggcgggtgagggctgccatgctccctgaggacatggatcagtgggacttgaacctgggcctcagactttggagcctgttctgtccaactaagccacagggcgacttcttcacctgctgggtgtctcagagctggggtgtgtgcgcattgaagcacccggatctaagcactagggttcggcacttgagtgacaaaccaatcctaggtaccctccaccctggctgcagttgctggctacagccctggtaagcataagaatcttcattcagtagcttttctccttgacctagaatctctgaggcccttggggccagggaggcaccgagaaagcaatcatccctgaattggacgagcaggtccaagaggctggccacccgacctgggaaggctgtcgccttcccttttggggtcctgtcctcatcttgcaaacacaggtgatggcgccacacaacagggcacgtcggactcctccatgcacctgtgtgttgagcgccagtgaaggtggagtgagggggtgatgtttctgctccacagtgcaggctgcatagctgcatagtggggcaccatatgacatgagatagtgggtgtcagtcactgattatcatctgcagaatgcaatgacaagagaccaccccccaacccttgtaggtttggtaagaaaatgagagaccaggccataggctggccctccccgaaattgctgctaagaagggagaggtgaaaaggtgattgtgtaaaactgtggtaattattgtgcttatcgttgtctgtctcttgaactttctttcatttttcccgagatggagtcttgctctgtcgctcaggctggagtgcagtggtgcgatcttggctcactgcaacctccgcctcccaggatcaagcaattctcctgcctcagcctcccaagtagctgggactacaggcacgtggcaccacatccagctaatttttgtatttttagtagagacggagtttcaccatattagtcaggctggtcttgaactcctgacctcaggcgatctgcccaccttggcctcccaaagtgctgggattacaggcgtgagccaccacacccagcctcctgaactttctgtgacaagaaagaatccaagtactggccgggagtggtggctcatgcctgtaatcccagcactttgggagactgaggtgggaggatagcttgagcccaggagtttgagactagcctaggcaacatagtaagaccccatctctatttatgttaaaaaaaaaaaaaaagagactcaattcagacccaaagacacaaatacagtcaggaatcacttcatggaggggaccattctggaaatgcatcattaggcgccgttaccaatgtgtgagcatcacagactgtacctccacaaacctagatgctaccgcctactgcacacctacactagatattacagttgaccttgaactacatgggtatgaactatacaggtccacttaatatgctgatttctttcaatgaatatattgaaaaaatttttggagatttgcaacaattcgaaaaaagtcagatgaaccacgtagcctagaaatactgaaaaaaaaatcaagaaaaagttaggtgtggccaggcacggcggctcacgcctgtaatcccagaactttgggaggccaaggtgggcggatcacaaggtcagaagatcgagaccatcctggctaacacggtgaaaccccgtctctactaaaaatacaaaaaattagccaggcgtggtggcaggcgcctgtcgtcccagctacttgggaggctgaagtaggagaatggtgtgaacccgggaggtggagattgcagtgagccaagatcgtgctactacactccagcctgggcgacagagtgagactccatctcaaaaaaaaaaaaaagttaggagtgtcaatgaatgtataagatatatgtagatgctagtctgttttatcacttactaccataaaacatatacacattgcagaaagttaaactttatcaaaacttatgcacacagactgtacataatgtgttttgcagtcaagagaaatgtaaacaaatgtaaagatggtagatgaaatctttttttttggatatggagtcttgctctgtcacccacgctggagtgtaatggtgcaatctcggctcactgcaacctccgcctccacctcccgggttcaaacaaattctcctgcctcagcctcccgagtagttgggactacaggcacctgccaccatgcccagctagtttttttttttccttcttttttttctgtttttgagacagagtctcactctgtcatccaggctggaatgcagtggtacgacttcggctcactgcaacctccgcctcctgggttcaagagattctcctgcctcagcctcccgagtagccgggactacaggtggcacgccaccacacccagctaatttttgtatttttagtagagacaggtttcagcatactggccaggctggtctcaaactcctgacttcattgatccgcccgcctcggcctcccaaagtgttgggattacaggcgtgagccaccacgtccggccaattttgtatttttagtagagacagggtttcaccatattggccaggctggtctcgaactccaaccttgtgatctgcccgccttggcctcccaaagtgctgggattacaggcgtgagccactgcacctagcagattaaatcttaactgcataacattagctgtagtgcacacggtactactgtaatcattttgtagcctcctgttgctattgtaatgagctcaagtgttgagaatatctgcttaaaacaccacatgacactgatcatctctgcacaagctgtttgtccctttagcaaattgcatattgcggtaaagagacatctctcagggttctcaagtatttttcaggtttagtgcaatatagtaaaccttgaataacatcatgggtcccataaaaattgccactagtcaagtgactgtagtcccagctactcgggaggctgaggcaggagaatcgcttgaaccccagaaatggaggttgcagtcagcctagagtgtgccattgcactccaacctgggcaacagagcaagactccatctcaaaaaaaagtgccactagtgatggcggaagtgctcccaagaagcagagaaaagtcaagacattacaagaaaaagctgaattgtttgatatgtgccatagattgaggtctgcaactgcagttgcccactatttcaagataaatgaatccagcataaggaccactgttaaaaaaaaaaaaagaagaagagaaattcacgaagctgttattgcagctatgtcaacaggtgtgaaaaccttgcactttctgtgaagtaactttttatctcactttgaaaatgcagtttttatgtgtataggactgctatcagaatgacacacctacaaggtttaatatgatttaagaaaaaagcaaagtcactatatgacaatttagaacaaaagcaaggcgaaggagcgaaagctggagaatataatggcagcaaaggatggtttgacaggtttagaaagaggtttggctttaagaagatgtcaggataacaggaacaacagcttctgcccacctagaggtggcagatgagttcccagatgccattaagaaaatcattgagaaggaaagatatgcatgtgctcaaacaggtttgtttttttttttttttttagatggagtctcgctctttcgcccaggccggactgcagtggtgtgatctcggctcactgctgcctcccgggttcatgccattctcctgcctcagcctcccgagtagctgggactacaggcgcccgccaccgtgcctggctaattttttgtatttttagtagagacggggtttcaccgtgttagccaggatggtctcgatctcctgacctcgtgatccgcccgcctcggcctcccaaagtgctgggattacaggcgtgagctaccgtgcccagcctcaaacaggtttattttgaaatggagtcttgctctgtcacccaggatggagtgcagtggagcaatcgtggctcactgcaacctccgcctcctgggttcaagcgattctcctgcctcagcctcccaagtatctgggattacaggagcctgccactacacacagctaattttttgtatttttagtagagatggggtttcaccatgttggccaggctggtttcaaactcctgacctcaagtgatccacccacactggcctcccaaagtgctaggatcacaggcatgagccactgtacccggcctcaaataggttttttaatgcagacataagtgccctattggggtgggggagccaaaaaagacattagtaaggaagaggagcaaacaccagaattcatttatttatttctgtttgcttggacacaggttctcacttttttgtccaggctggagtgcaatggcgtgaacatggctcactgcagcctcaatctcccaggctcaagtgaacctctcacctcagccttccaagtagctgggactacaagtgaacaccaccacacccggctaatttttgtggttttttgtagagacagggttttctcatgttgcccaggctggtctcaattcaggcctcaagcgatccgcccacctcggcctcccaaagcactgggattacaggcatgagctaccgtacccggccaagcaccagaacttaaggcaggataacgctactgttttgtgcaaatgcagttgggtttatgatcggggctgcccttatctatgaagctgctaacccctgagtcttaaagggaaaagataaacaccagctgcccgtcttctggttatacaacaagaaggccagggcaggacagccatggtggctcacgcctgtaatcctaacactttgagaggccaaggcaggaggtaaaaatgcctggacaacaaaaattctttttctagattggtttgctcctgaaatcaggaagtaccttgctagtgactgcttgttaaagttcttttgatattggacaatgcccctggccacccagaacttcatgagtttaacactgaaggcatcaaagtggtctactgcatccaaacaaggtctctacttcagcctctagattggggggtcgtaaaaaccctcaaggctcataacacacgtactctatggagaggattatcaaagctacggaagagaacctcagcagagcgaacattatgaaagtctggaagggttacactacaggaaaggccatcaagcctgaaacaataaattcctgctagagaaaactgtcttcagatgtgcatgacttcatgggatttataacagagtccatgaaggaaatcgtgaaagagattgtagagacagcaaaaacgggtagagggtaagggatttcaaaagatagatcttggagaaatttaagaactaaaaagctggacatgggtggctcatgtctgtggtcccaactgcttgggaggctgaggcggggagatcacttgagaccaggagtttgagtccagcccgggcaacataacaaatctcttgtctctataaaaaaataaaaattaaataaaaatttaaaaaaataggtctggccaggcgcagcgggtcatgcctacaatcccagcacttcggaagcccgaggcaggtggatcacctgaggtcaagagttcgagagcagcctggctaacatggcgaaaccacatgtctactaaaaatacaaaactagctggccgtggtggcacatgcctgggtgacagtgcgagactctgtctccaaaaaaaaaagcaaaacaacaacaacaacaacaacaacaacaaaataggccgggcaaagtggctcacgcctgtaatcccagtactttggaaggctgaggcagatggatcatttgaggtcaggagtaagagaccagcctgagcaacatggtgaaaccctgtctctaccaaatacaaaaattagctaggcatgggcacacacttgtaatccaagctgctcggaagactgagacgggaggatcccttgaccccagagcgcagaggctgcagtgagccgagatcgtgccaattcactccagcctgggtgacagagtgataccgtgtctcaaaacataggtgaggcgaggtggctcacacctgtaatcccagcatattgggaagctgaggtgggcggatcacttgaagtcaggagtttgagatcagcgtgggcaacatggtgaaaccctatctctacaaaaaatacaaaaaattagccgggcatggtggtgcatgcctgtaatcccagctactcgggaggctgaggcatgagaatcgtttgaaccagaggggcagaggctgcagtgagctgagattgtgccgctggactctagcctgggcaacacacaaacactccaaatcgaaaaataattaattaattaaaaatagaagagctaacagataccacactggagaaattaacagaagacagctggatggaaaggagtgcttccaaatgagtgccagatgatgaggaagaagccggagaagcggcagcagcaccagaaaagaaaatgacaatctggtaggaggattctcattattcgagactgtttctgacttcttttatgacatggacccgagacatgggcactggaactaagtgtaaatggtagaagaaggaataatactgtatataaacatttttagggaaatgaaaaagaagtcaggcagaaattgtgagatattcccataaagttacagagtgcctgtctctccttccacctcttcggcagcaagaccaacccctactcttcttcctccttagctgttcaacacgacactgatgaagatgacctttgtgatgatccatgtccgcttcataaatagtcaatatattttctcttcctcccttctttttttttaaaagaggcagggtctcgggaggcagaggttacagtgagccgagatcatgccattgcactacagcctgggcaatagagtgaaactgtctcaaaaataaagaggcagggtctgtctggttgctctgtttggaccctctgtcatctaggctggagtgcagtgccacgatcatagctcactgcagcctcaaattcctggactcgtgttcctcctgcctctcagcctcttgagtagctagagctatagatgcacaccacacagcctggctaatttttcctatgattttcttagtaatattttctttcttctagcttattttattataagaatatagtacataatacatataacatataaaaagcatgttaatcaactgtttatgttaccaataaggcttccggtcaacagtaggctattagtagttaagtttttggggagtcaaaagttacatgtagaggctgaggtgggcagaccacttgagctcagttttgaaaccagcctgggcaatgtggtgaaaccctgtctctacaaaaaattaaagaattagccaggcgtgctggtacagggctatagtcccaagctacttgggagcctaaggtggaaggatagcttgagctcaagaggttgaggctgcagtgagctgtgattataccactgcactccagcctgggaaacagagtgagaccctgcctcaaaaaaaaagtttatattcagattttctctttttttttctttttttgtgagacggagtcttgctctgttacctgggctggagtgcagtggcgcgatctcagctcactgcaacctccacctcccgagttcaagcgattctcctgcctcagcctcctgagtagctgggattacaggcatgtgccaccatgcccggctaatttttgtatttttagtagagacagagtttcaccatgttggtcaggctggtctcggactcctgaccttgtgatctgtccacctcagccttccaaagtgctgggattacaggtgtgagccaccaaacccggcctatattcagattttcaactgcacagggcttggtgtcccaacccccatgttgttcaagggacagctgtataccccgttgctcccaggctacaaacctgtaaagtaacacagtaagtatttatgtatctaaacataaaaaaggtacagtaaaaatactgtactataatcttataacaattttaataatgaccactgtcatatatgcagtccatcactgaccaaaatggtgtcatacagggccgggcatggtggctcacacctgtaatcccagcactttgggaggccgaggcggggagattacttgaggtcaggagtttgagaccagcctagcctgcatggtgaaatcccatttctactaaaaatacaaaaattagctgggcgtgggctgggcatggtggctcacgcctgtaatcctagcactttgggaggctgaggcaggtggatcatctgaggtcaggagttcaagatcagtctggccaacttggtgaaacctcgtctctactaaaaccaaaaaaattagcagggtgtggttgcaggcgcctgtagtcccagctactcgggagactgaggcaggaggatcgcttgaacctgggaggtagaggttgcaatgagccgagatagtgccacagcactccagcctgggcgacagagggagactctgcctcaaaaaaaacaaaaaacaaaaaacaataacaaaaacaaaaaagaatgaatgaagaaagaggttccggacagcagaactcatggaggttcctggagggtggcgtgcccagggagggcatggaagctccacgccccttcccccatacgtcgccctatgtgactcttcatctgaaaaaatccctcaagtcaagaatacaaggaactaagagggagttaggaagaatataagggccatgtactcggcccccaacccctaatctcggtgggtgtgggtgataggaaatttatgtctggagatctaagagcaacatgaacttctgctctgcttctcttctagaattttaagaaggtggtagactggcagatgtgacccgccatcacacaagaagaatggaagagatggtggcacactgagactagttggagacccctaggaaattacccttcagtttcctgtggctcccaagtgatggaggaaggctgaaagttcttgcgggcaaggagagagggaaggagcagaaactggttatggtacataaatctatacaaggagaactgagtgtgcttgtgttattatttttaatgtttagataatcaatgtacaaacattcttgctaagtcaggcacggtggctcacacctgtaatcccagcacttgggaggcggaagcaagtggatcatctgaggccaggagtgcgagaccagcctggccaacgtggcaaaaccccgtctctactaaaaatataaaaattagccgggcatggtggtgggcacctataatcccagctactcgggaggctgaggcaggagaatcacttgaacctggtaggcagaggttgcagtaagccaagattgtgccactgcactccagcccggataaaagagcaagactctgtctcaaagggaaaaaacaaaaaacaaaaaaaactctttgctatatatacacagttttgttatttttatttttaaggaaaactgtatttctgaaagtagggtttgaagagaagtttattatagattactgacaaagctaatctatcagttaatatatataacaatcatttatttatttatttatttttaaaagaaagaggctgggtgtggtggctcacgccagtaatcccagcactttgggaggctgaggtgggcggatcacaaggtcaggagctcgagaccagcctggccaacatggtgaaaccccgtctctactaaaaatacaaaaattagctgggcgtgggggcgcccacctgtaatcccagctactcgggaggctggggcaggagaattgcttgaacccgggaggtagaggttgcagtgagacaagatcatgccactgcactccagcctgggtgacagagtgagactccatctcaaaaacaaacaaacaaaaaaataagaaagaaagaagatctaaaaccaataacctaagcgtacaccttagtgagctagaaaaagaagatcaaactaaatccaaagctaacagaagaaaatagtaaagtttagagtggagataagaaaatgaggactataaatacaatggagaaaaatctatgaaaccacaagttggttctttgaaaagatcaacaaaagtgacaaaccttttagttaaactaagaaaaaaatgagagaagactcaattactaaaatcagaaatgaaggaggggctgtaactaacgactgaaaataagacataagttaaaaggaccataagaaaatacaataaactgtgccccaacaaattagatagatgaagtgaacaaattcctagaaacacaaaccatcaaaacacaagaagaaatagaaaatctgaatagacaagtaaatcaggattcgaaaaaaccttccaacaaaaaaaggccaagaggctgggcacggtggctcacacctgtaatcccagcaatttgggaggccgaagcgggtggatcacgaggtcaggagttcaagaccatcctggctaacacagtgaaaccccgtctctactaaaaaaaaaatacaaaaaattagccaggcttggtggcggcgcctgtagtcctagctactcaggaggctgaggcagaagaatggcgtgaacctgggaggcggagcttgcagtgagccgagatcacgccactgcactccagcctgggtgacagagtgagactctgtcacacacacacacacacacacacacacacacacacacacacacaaaagggccaagaattagatagcttcactggtaaagcaaacatttaaaagaagaaataagccgcgtgcagtgattcatgcctgtaatcccagtgctttgggaggctgaggtgggcagatcacttgaggtcaagcattcaagaccagcctggccaacatggcaaaaccccatctctactaataatacaaaaattagccaggtatggtggcaggtgcctgtaatcccagctactcgggaggctgacgtaggagaattgcttgaacctgggaggtggaggttgcagggagccgagattgcacgactgcactccagccagggtgacagagtgagactccgtctcaaaaaaaaaaaaaaaaaagaaagaataccaattctcctcaaactcttccaaaaacacaaaagagagaacatttctaaacttactctatggggctaggattagcctgatacccaaggcagacaaagatactacaaagaaagaaaaataggccaggtgtggtggctcacgcctgtaatcccagaactttaggaggccaacatgggcagatcacttgaggccaggagttcaagaccagcctggccaacatggtgaaaccctgtctctactaaaaatacaaaaattagccgggtgtggtggtggaagaattgcttgaacccaggaggtggagattgcagtaagctgagatcgcgctactgcactccagcctgggcaacaaagagcaaaactccatttcaaaaaaaaagaaaaagaaagaaagaaaaatacaattgaatattcctatgaatacagatggagaaatcctcaataaaatactaggaaaccaaattcagcagcttatgaaaggattatacaccatgaccaagtgggatttatccccgcaatgcaaggatggctcaacatttgaaaatcaatccatgtaatacaccaaattaatagaatgaaggaaagtaaccacacgatgattttatgtatttatttactttttttttttgagactcagtctcactctgttgcccaggctggagtgcagttgctcaatctcggctcactgcaacctctgcctcccaggttcaagagattctcctgcttcagcctcccaagtagctgggattacaggcgtgtgccaccacacccagctaatttttgaattttttttggtagagacggggtttcaccatgttggccaggctggtcttgaattcccggcctcaagtaatctgcccacctcagtctcccaaagtgctgggattacaggcgtgagtcaccgtgcctggcctgttttaactgatgcagaaaaagcatctgacaaaaactaaaacattttcatgataaaaacgctcaataaactaggaacagaagtgaacttccagacaggcctggtggctcacgcctgtaatcccagcactttgggaggccaaggcaggcggatcacccgaggtcaggagttcgagaccagcctggccaacatggtgaaaccctgtctctaccaaaaacacaaaaattggccagtcgtggtggtgggcacctgtagtcccaggtactagggaggctgaggcaggagaattgcttgaacccgggaggcagaggttgcagtgagctgagatcacaccactccagcctgcacatcagagaaagactctgtctcaaaaaaaaaaagaacaagaagaagtgaagttcctcaacacaataaagcccatatataaaaaacacatagctaacatcatacacccacacatcatacatttcacagactggtaaaaggctgaaagctttcctcctaagatcagcaacaagacaaggatgcacacttccaccatttccattcaatacggtactagaagtcctagccagaggaattaggcagaaaaagaaataagaagtatccaagttggaaaagaacctgtaaaactatttctgtttgcagataacacaaacttaaatgtggaaaaccctgaagaatccacaaacagaccgggtgcagtagctcatgcctgtaatcccagcactttgggaggccaaggtggcaagattgtttgaggccagcagtttgagaccagcctgggcaacatagtgggacctcatatcgacacaaaaaatgcaaagattagccaggcatggaagagcatgtctgtagtcccagctacttgggagactggggcaggagaatcaattgagcccgggaggtcaaggctgcagtaagctgtcatcatgccacggcactccagcctgcgtgacagagtgagaccctgtctcaaaagaaaaaaaaaaagaataaagttggaaaaattaactcaaaatggaccaaaaaccctgggtgcaatggctcatgcctataattccaacactttgggaggccaaggcaggaggattgcttgaactcacgaattcaagaccagcctgagcaacatggtgaaactccatctctacaaaaagtacaaaagttagccaggtgtgctggcatgcacttgtagtcccacctacttgggaggctgaggtgggaagaccacttgagcttggggaggtcgaggctgcagtgagtagccactgcactccagcctgggtgacagagtgagactcaaaaaaaaaaaaaaaaacccaaaataggctaaagacctaaatttaagaactaaaggtacaaaactctcggtaggaaacacaggggtaaattttcatgcccggatttggcaattgttccttaaaaatgacaccaaaagcataaaccacagaagaaaaaatagatacatttgacttcattaaaattccatttctagggagggctggattacagcaggcactgggagaccgcacaactacctgccccctccctggcactaccatcccctggagggtctgccttcagttcaaaaaaaaaaaactgatactttctggccacattaaaaaaagaaagaaaatttaaaagttgtatgcatcaaaagacgctattactaaagtgaaaagacaacccatagaatgagagaaagtatttgcaaatcacatagctgacgagggggttaatatccagaatctataaaagagaactcgtacaactcaacaacacaaacaaaccaactttaaaatgggaaaaggtggctgggtgcagtggcctgtaaacccaggactctgagaggctgaggcaagaagatggcttgagcccaggagttcgagatcagcctgggtaacatactgagaccttgtttatataataactgggcaaggctgggcctggtggctcacttgaggtcaggagttcaacaccagcctggtcaacatggtgaaatcctgtctctactacaaaaaaaaaaaaaattagctgagcatggtggtgtgtgcctgtagtcccagatactcaggaggctaaggcaggagaattcgcttgaacctgggaggtgggccgggagcggtggttcacgcctataatcccagcactttgggaggctaaggcaggcggatcatgaggtcaggagatcgagatcatcctggctaacatggtgaaaccccctctctactaaaaatacaaaaattttgccaggcgtggtggcacacgcctgtagtcccagctacttgggaggctgaggcaggagaatcacttgaacctcggaggcagaggttgcagtgagctgagactgtgccacactgtactccagcctgggcaacacagtgagactccttctcaaaaaaaaaaaaaaaaaaaaaaaagaacccgacggcagaggttgcagtgagctgagatcgtgccacttgcactgcagcctgggcaacagagcgaaactctgtctcaaaacaaacaaaaactgggcatggtggggcaagtctgtggtctcagctactcaggaggctgaggtaggaggattccttaagccagggtggtagaggtttcagtgagctatgattgtgccagtgtactcgaacatgggtgacagagacctcatgtcaaaaacataaaacgtggggaaaaaaggactaaaatagacatttctccaaagaagctatacacatggtcaataagcatatgaaaataagctcaacagcactggtcattagggaaatgccaacccagacgacgagatatcacttcatacctcttaggatggttataataaaaagatgagagtatgactcttgcctataatcccggcactttgggaggccgaggcaggaggatcacttgaggacagaagttcaagaccagcctcagcaacatagtgagaccccgtctccataaaactttttttattttaaaaaaaggtgaggatacagaaaaagtggaacccttgtgcactgctggtgggaatgtaaaatggtgcacctgcaggttcctcaaagttaaaaggagaattacaggccagacgtggtggctcatacctgtaatcacagcactttgggaggctgaggcgggtggatcatctgaggtcaggagttcgaaaccagcctggccaacatggtgaaaccccatctctacgtcccagcactttgggaggccgaagcgggagatcacgaggtcaggagatagagaccatcctggctaacacagtaaaaccccatctctattaaaaaatacaaaaaattaggcgggcatggtggcgggcacctgtagtcccagctactcaggaggctgaggcaggagaatggtgtgaacccaggaggcagagcttatggtgagctgaaatcgcaccactgcactccagcctgggcaacagagcgagactctgtctcaaaaaaaaaaagaaaaaagaaaaaagaaaaaaaaggcagaattgcaataggcccagcaattccacacctaggtataccgacaagagaactgaaaacgattcagatagtcacagcagtattattcacaacagccaagcagtgtaaacaacctctgtgaatataagagttcattcacagatgagtgggtaagccaaatgtggtatgtacacacagtggaagatatggccacagaaggaatgaaattctgatacaagctacactgtggatgaaccttgaagacattatgctcagtgaaagaagtcagacccttccaacacagggagggggagagggtctgcccacctgacagaggcgagggagaggcatccacgtccctctgcaccagttcagcaggtgggagctctaccttatcctcttcaggcccccaccggctcttccgcttcctcttcacggtggctgcggaggctggcttcccgggggcagctggagcagggatgatagtgggcgcaggcgtggacgaggcggggcaggtggtggctgggggtaaggaccctgacagggcctcaggaggggacttgcgcttcaggccgggatcaggtgctgtgaagctgcctgtggagctggccttggctttccggaactcctccagcttctgtcggtagtacttgtacccttggctattgggctcatacagaaagctgcaaaggagagttggggggtgcagtgtcagctgggcccgaggccctgtccctgattctgggcaggagcagttctggccttgtgtgcccacgttggccagggtcactatatggtcatgtcatagtcacggtctccaccatgacctcctgccctgccaggcctcctggcagtgactgctggttctggtggcccgatgcccttcctttgaactgagtcactccaatcctcaccctgtctttatcaggcacccatcacactgtcattgttcaccctgctacaaagggaaagggcagggaccctcagacccttccccagggcctgggaaaagtgagacattcacaccaaaaaatctcagattgtggggagacaccagacacgagacagggcagagggacttgtcttgatcccaagggcttctcaaatgcatctttgagacaatgaacatcagaacggaccaaggagctgatttctaccccacgtgggggcaggcagcctcagggaagtgtggcttccagtgaggctgggagcacaggtcttctctgtccctacccagcctgaggagcacagcaggtggcgctgggttcagagccatgttccgcacctactggcgcctctcggaccgtacacatccccagtccacaggactgtctttggggtctatgccaaaagggagagtcttggcccagctccacatggcagaacacgggagagaactgaatgcatgtacagccctgaaagcatgttacagtgctgaacaagatggggctggacctgcacttgtgaatctggagggatggtcatagcaccaaggcgtgcaactaatgtgaattaaagggtcaaggatgctgtgaagtccctttgtgttacagaggccgggcgcggtggctcacgcctgtaatcccagctctttgggaggccgaggcgggcagatcacctgaggtcaggagttcgagaccagcctggccgacatggtgaaatcccgtctgtactaaaaataaaaaaattagctgggcgtggtggtacacgcctgtagtcccaactgctcgggaggctgaggcaggacaatcacgcgaacctgggaggcggaggttgcagtgagccaagactgggccactgcactccagcctggaccagagtgagactccatctcaaaaaaataagataaatagtgagcgagcagcaagagaccccttagacagtttctaggtgagcctgtgtgtctacggccctgctaacatccggtacctcaagagggtgggacagaaggacaggagatgacagcatcttctctgtaatcctgggtcatggtacacgtgtgacccagtgaggaacatatgcaaagattaagaggtaaaagcaacaactgttcaggagagaagggaacagttggtcagatttggaaaagacacttgacagccgggtgagttcagacatggatttgagaggccaagctggggaggctcacttgctagggcgagcaggcatcggggtgtgggggccccttcctggtctcagctggtgcttcaccctgagtgtcctccaggatggtccaaggatgcatcacagtcccctggagggtctgcccatctcggggagggggttacaatggcactcaatggtagacccccatgagggggagaaagtggagccccccaacaccccatctagaacacggctgggtgcaccaccaaggttcccctctggtggaactaatcccaccctgaacccagggataaccactgttaaggtgtttcctgccagtttcagcaaagatttatcttaatagagctgtgatcctatacatatcccagttttaaaaaaaatttctgcctcaagctgatgacataagcctttcctattagaacagtggaagcatgttcactgactggccttgcttcagttccctcacactgggctgccagctcacatgggtgccttctgaaggcggcatactccactggggagatgtgctgatgatttaacccacagaggttggacgctgactgtgtcactgacttttcttttttttcttcctttttttttctgagacggagtcttgctctgtcgcccaggctggagtgcagtggcacaatctcagctcactgcaagctccgcctcccgggttcaggcaattctcctgcttcagcctcctgactagctgggactacagacgcccgccaccacacccggctaatttttttttttttttgtattttttagtagagacggggtttcactgtgttagccaggatggtctcgatctcctgacctcgtgatccaccccgctcagcctcccaaagtgctgggattacaggcatgagccaccgcacccggcctactgacttttcattacagctgatgctctattgacatgatttccaggatgtatctcagaaatgggagaatgactagtccaagggatgggcgtttccagcttttcattttttttttgttttgtttttcaagatggagtttcactcttgttgcccaggctggagtgcagtggtgcaatcttggctcaccgcaacctccgcctgccgggttcaagccattctcctgcctcagcctcccaagtagctgagattgcaggcatgcgctaattttgtatttttagtagagacggggtttctccacgttggtcaggctgttcttgaactctcgacctcaggtgatccacctgcctcggcctcccaaagtgctgggattacaggtgtgagccaccaagcccagcctcattttttattttttgagatggagtcttgctctgtcacccaggctgaagtgcaatggcatcatctcggctcactgcaacctttgcctcctgggttcaagtgattttcctgccttagcctcccaagtagctgggattataggcacatgacaccatgcccagttaatttctatatttttagtagagatggggtttcgccatgttggccaggctgttctcgaactcctgacctcaggtgatccacttgccttggcctcccaaagtgctgggattacaggcgtgagccaccgcaccaggcctccagcttctttatagccatgcagttggttacaaattgtttcccaaagtggctggggtatgcctggcccacaggcgtgacagggaagggccaggagtggccacatgaggcggctgttagatttgggggtgaggggaggtctgccaaccatgtgggtctaactagcatttctgtgctttggggctgcctcacagctgaccctgcatggagattaaacacaggagcaaacctgcacaccctgcaggggcttgaatacctggtcgtccccccgacccacccagttctttcctggtccggctctggctctgcagtgagtgcggaaatgagctcccttcagcctcgtctcctctggctgcccggggtacccaccccaggcgacctcaaccagcctggcctccccgacagccacacctgacaagctgggcgcctgtcagcaacaccccagaacagaaaggacacacaggagggccggggccacctgcaccaatagcatctctcagttctgacatcaggggtgaggctgggctgcagcggctgggccctggacccctctgaccaagcagagccaccgggctctgggccttggacagaattccatatccttgcctgcttctcctttgaaagggttccacagtcagtgtctacctacaatgacagcaaactaggtttcttatttatatagccttaatcaggcaaatgaaggaaagacatgatgacttggagtggactagtgatccaaccctgaggtgtggtcaacaactcaatgatccccagggccagtctgacattcaggacacctgtcgggggggcctccagtcccaggcagatccatctcctgaactccaggcctaaacaatccacggccccaacacaggctcctggacacacaggtaccagactggggcacacctgaatcccaagcagcccctctccccgtccccattcactgggtcagctgagccttgaccctccctgttcccagcccccatgttccctcagtcccacctcccaatggtggcccactgccctcgtctgcctggacctggcctggccatgtctgcccaccctccacgaccttggccagtgaccacagaagcacagttgccccatctgtgatgaagtctagggctgctgaatcaaccagcccagacagctgctgccccaggactgtcatgtgctgtcacacctcctcactgattgagtcggggcttgtgtaacctggggccaggcgtgtgctcacgggcatgtcaccctcacatcccccaggcacccacccgcctccccgggcacagagcaagtgccaaacccacccaatgaatggatgagccagtgaacacagacccagccactggggctagggtacgaccgcatggccggggatggcagggaggctaggctgcttgtcacacacccacccttctgtggaactcgcacacaggctgggtgttccccctccacagatcctaaagttccccattccctgccatttccctcatcataaaggggagaccctgagaacgtacacaacataaactgaacagtactgtgaatttccacttgagagcctgacttgcccccggccaagggctgctgtgtgtcccaaaggcaactgggcaagtgctagagactttctccatgaggcacctgaaagacacaaaggccccaaaggccccgtgcacctgcctcagagactacccaggggtgctggtgtgtgcgtgggacatgcctgtggggaggcagagctgggctctggggtcagagactcttggacctgccagcttctcacagtgggaccccagcaggtggctggactatgctgatccagtgtcctcccctgcagggggactgtggccagggtgacggtcacctccctggcagggccccccttacctgaatgcctggttctcacggttgttctggagggcaatggtttccacctcgggacccccgtccgctatgaacctggccaacttttctgcaaggttcttgacctcttcgtcctctgggggtgaaactttaagcaggctgtcagtactgggctcaactcaccacacccaacagcctaatttctgctaagaaccccaagggcaacaagtggggtttgttttaggaatgatgcaaagagaaacaggcaaatgggaatcagattactacactgggaccagatgccagaattcataacacacctcaagcccccacccccgacccccgccccgtcccacaagggaggtcaagagggcctgggacatgagccaggacaaaggatccaaatgtgactgcgggtctgggtagggcaggaaggcagatgggagcaccccaggtcacatggttagggggtgctgttgggcctcctctcctggggagaggctcagggcacagggccacagggaacacaaggaacaaacctctgcagcctgcgcttggcctgaacatcaattccaccccaccaacccaccagcacttggctgggattttatgtcattgcagtcaaagaccagccagtatttccccttcccctgaaattcatcccatcagaattgcaccagctgacagtgtctgtcccccaggccctcggccctacactacacttgccttgccctgtcctcagtgcccaggaggaagctggggctcatcaacacttgttaatgtaacaaagaaccaacaagcaaaagccccctctacctagggtactgccctgaaccgctctcccagaagcgacctcgacctccatgagctcccgtctaccccacaatgtggcctgacactcaggcttcaccaggtccttggagcactgagggggaaggtggtgtcagacccattcccagagtgaccccagatgcctgggagaatacaggcctcaaccaccggtgccacacagtgccactccagcacctccaggaaccccgattccgcattggggcacggtatgtccacaggcctccccagaatctcccacccgctccgtccacctacctttctgagaggctgcctgcgacttctgtgcttcctttcttatctcagccaccttcttcctgtagtagaggaattccctgctattcttatcgtgcaaaaatctggagaggaggaagtttgcagaagagaggggaaaataagtatctgtgacaggcatatccctgcagcttctatcgtgcaaaaaaaggcaggctggcgagcagggacccgaaagcaagtctccgtgccacatgggagccacttgtcacttctggtgagaatcagaaaacgcttggaacagcatccggcccacactagcaagcacccagccccacacgtgcgactgtgcagcaaacgcattcaacagcacagccttcccttccccggagatactcacgcaaatgctgggttatccttgtagtcctccatagctactttttctaactcggggcctccttctgccacaaagcgggccaatttctctatcactttccgagtctcggctccctctgggggtgaaactttaaggaggctgtcagtactggggttcaactcacacaccccacagtcaataggcacactctctctatggaccacaacgacagagggggtggggggagaagagtgtgagatgcaggaggctgtcgggcgtcccgagtccaggcacaaaacaccatgacgaggggggagtcggtctcactgtcttggtgagacacactaggtgggagagaagtgtgtgaggctgtggtgagctccaggctggaagctagcagaaaatatatccagcttcccctggttttggtgggggaaatgcttaattcttttctttctttaccagttttcagcataatacatcggttccctttcatccttcaaagatgacacgttcttttttaaaaaataccattatgagctctgatttaaacacactgggtgggtttcgatccatggcaactagtgtcatcatagaagctctgcggccggtggaacctcttcaagctggctcctgagggctctggacatggccccaggagtctctgatggcctccttgccatctgccaggacaggcgctccaagatcatctcatacacttcctgcccagacccagagccagccacttctccaagaagtcggtttccatgagaaactgcatctccagaccagcatctgggagctagggatgctcaatgccacaggcttaatcattatttcggggccttttcagtgaacagagctataaagatatatttttatatacggattagcctccccactgagccatgtggaacttgcttttgcatttttcccttggcctgtttctgaggctgtgagtttgtcagctactacacagactgcagtccttgtaggagatgcacaagagaaatttctcgctgccagcaagtgcctggcaactgggcaacatgccagacctgtggctaatcttattccccttgttgcttgggctgctgggaatgggggagaggtggggagtgtgtagcccaacgagggcccctgtgaggtcccgagagcattccgtgactgtctttcaccctaggtcgccctcctgccatgggcccagcaacaatcctgacctggttgctgtttacaggaacaggtgcgtttctgaggccatgcagacagtgggtcataatgggcttcaagggccccgagatggccaataccccttgtaatgcagcagttcccaacagggtacccttggagctgctggggcacccctttaaggaaaggacacacgccagctccattctaatggcccgggggccaagctggcctctgatccgctcggacacacagccagaagcaagggatctcaaggctgtcatggcacaactccacagtcgcttcagtctgtgctgtcagggtgatgtgacctcaccggctagcccttcacacagttcaggtgtcacagggactcgtcctgaatgtggacagggctggacttgctggcaatgctgtcaccacagccacccccctttgccctcctacactgggcggtctggacaagctcacccgtgaccagtgaccgtcctttcccagggatagaagagagcaccctccaacctgcagctcatacctctggcctaaactcaggggacaggtaacccatggtgaggggcagtgctttggggcctcaagggctcagcggaagagccttagaagctcctcctagaagggatgtgaggatgcccttttggagcaaatgcgagaagggcgtgcgcccctgccttggctgggatgagccgctgtgtgagtggaagatggatcccgctgctcccaagatgaagcccacgcgctgatgcccagcaacaccccagccccgcccctcaccctcctttgctctcctcacctcagagggcctgaggctcagctcagaggtctggtggctgcaactcagccgaaagcacccatgcccctggcagcacttgccctgcccaccacagatcccacctgctagagcacgggcactggtggtgggggagcagcagctcccacaacttacctttgatctccagccactgctcatagtcctcctcctcgtcctcgtcaggggactggaagacactcgggcggtgcgccacgggcagctgcttggcgtgggagtagctcttcacagggcccggcaggctggccagccccaggcctgtccgcctgctgatgagcagggacctcttcccagcgctgggggtgggtgtgctgggaggggcgctgggcgcactggtcggggcgtctggtatagaaggaaggatatgcgcactcgggatctgcagggcacctctcccggcttccgacctaacctaggtgctgtgggccccgggggagctgggtccttgacttccagaactcaggggctcagaggaggccaccctgattttacagatggggacagtgaggcaaagagcaaaaggactcgttgtggtcccccagccagaaaagcagcagcctggggctctgaagtgggccgctgtggctggaggcatctcggtcgcgctgcacccacagactggggacagttctggggacagaacgtcagttctgccgggtaagacccgagtccccgaatcccagtttacaaccattcccttggaggtctgtggccaggctgactggccaggggccagcctactgggtgttctcagcctgacacctgatggggaagggactcaaaccagccttcctcattctaggatgaatttggccttgggttaacttttcttagctgttccctgggaaacctgacagaggtcgaagaccagctgtctcaccagcaacaatgggctctggtcggtaaaccccaaaatcagagacatgggcagaagctccacgggtgacgatttacccacctggcatatcacactgcacacctgtaggcgaccaacctacagacaggggtcccattccttgcacaggcattgctgcccactggagaaggccgggaatcccctggggcactgacaagggggccaggtgaggacctggagaccagccattctagcccacactttggtgtccagaggacctacagtgcagaagcacccacagcaaggcaggggatggggcaaggctggtgtgtgacagcttcaggaagagccctgagtctggtggggagcagcatcatgaaattggccagctcaccaccctgagagcaggactagggcccccggatcatgaaagatgctggctctgcacttggggacctcatctttttttttttagtgacagggtcttgctctatcacccaggctgaagtgcagtggtgcaatcatggttcactgcagcctctacctcctgaactcctgggctcaagcaatcctcccagctcagcctccagagtagctgggactacaggtgcacgacaccatgtctggctaattttatttttattttttgcagagatgggttcttgctaggctgtccaggctggtctcacactcttagattcaagcgatcctcccagctcagcctctcaaagggattacagacatgagccaccatgcctggcaggggcttcatctttttaagccttagcttcctaaatggaaagtgtggaaatggaggtaaccagctgcttacagaactcaatgagatttagttggaccatctagacctaaaaaaaataacgtcgagtaagagaaaaaagcttggaacaaaacgcacactatgtcgtcatctgcataaagggtcaaacatctgaaactacggcacacactgcttgactgagaggacaacaggggttgtcagacacacaatttctcgacagttacttcctgtaagaaagggggatgggaggacttcaacctctggtatttttcttttttttttttctttttgagacttagtctcgctctgttgcccaggctggagtgcagtggcgtgagctcagctcacgtgagcagagctggttgcctcccaggttcgtgcaatcctcccacctcagcctcccaagtagctgggattataggggtgtgccaccatgcccagctaatttttgtatttttagtagagacggggttttaccacattggccaggctggtctcgaactcctgacttgaggaggtccacccgcctcggcctcccaaagtgctggaattacaggcgtgagccactgtgcccagtgagtatttttcatgattaacaaagatcagaagtatcaaaggcaaaatgttacatctatgaattcttttttgttttctttttttgagatggagtcttgctctgtctcctaggctagagtacagtgacgtgatctccactcactgctacctccgcctcccaggcccaaaagtgatccacccatctcagcccccccattagttggggttaaagttatgcatcaccatgcctggctaattatttgtattttttttgtagagaggagacttagccatgttgcccaggctggtcttgaattcccgagctcaagcgatcctgtccccttcggcctcccaaagtgctgagattacaggcataagccaccgcacccagccgacatctatgaattctgagtgaagagaatacgacgtgtgttatcagacgtctaccaaagggaaacagaggtagagagaggtgtccctccagaggattcagtgagagcacagacgtggtctgcttgcacggagcaagggacatggcaggcactgagtccacattccctggcacacggggtggtacccgatgaacactagtgccctggtggtcattgttgggtgcccccagctgcgtgcccacccggcacctcagccgcagcaggccccagaacctattgttctctgatgcagctcaggtgtctcgggccagcccggtgtctctgaaaaccctgtatgcagaagacctgctcacccctgctggtgggttcaagctgacccagcttggggatgcctcccatctcccaaagtggtctcacaagtgtggggaaggcttcatcatggctccacctgccccagactgaaatctgacttatctgtctctgctcctacagggtaagcacattgagtgcagggtctacatttgcccccttggtaattttttttttttttgagacgaagtctcgctcttgtcccccaggctggagtgcaatggcatgatcttggctcacctcaacctccacctcctgggttcaaccgattcccctgcctcagcctcccgagtagctgggattacaggcgcctgccaccacgcccggctaatttttgtatttttagtagagacagggtttcaccatgttggtcaggctgatctcgaactcctgacctcaggtgatccgcctgtctcggcctcccaaagtgctgggattacaggcgtgagccactgcgcccagcctgcccccttggtattaatttacatatttattacttgggctgggtacagtggctcctgcctgtaatgtcaacactttggaaggctgagacaggtggattgcttgagcttaggagtccaagaccagcgtgaccaacatggcgaaatcacaactctacaaaaaataaaaaaattagccaggtgtggtggcatgcccctgtagccccagctacagggaggctgaggtggaaggtttgcttgagccccggaggttgaggctgcagtgtgctatgattgcactactgcattctagcctgagcaagagtgaggccctctcaaaaaaacaaaaattactggccgggcggagtggctcacgcctattaccccagcactttggatggccaaggcgggcagatcacgaggtcaggagatcaagatcatcctggtaacacaatgaaacccagtccctactaaaaagatacaaaaggccgggcacagtggctcacgcctgtaatcccagcactttgggaggctgaggtgggcggatcacaaggtcaggagatcgagaccatcctggataacatgatgaaaccccatctctactaaaaatatttaaaaaattagccgggcgtggtggcgggcgtctgtagtcccaggtactcaggaggctgaggcaggagaatggggtgaacccgggaggcggagcttgcagtgagccgagatcgcgccaccgcactccagcctgggccacagagcgagactccgtctcaaaaaaaaaattatttatgtattatttatttatttatgcctttggtgcacgcatgggtggaatgagggcgatctatgattaccggtgagcaggagtctgaggtgggacccatcacttcccatgtgcccagcaaccccagggggagatgcaaggacagcacaaggaaaggggaggcctacactcacctgtgctggtctgtgccttctgcaacttcagaaactgctgcaagaagctaccatcgttggcaaacttgttggaaatgcaggaagagttgtgtgcatttgtgattctagaaccaagacagaggacagagagggtgagctggctagagatggagtgagggcaccagaggacgaggatgaggatgaggccatcacctcgtccatcatggcccctaactcaccccagcactctcacctactgggaccccaaactggcccccagagatttcaagagactactgcgaagtgcgcacagcaggcttcagtacggtaagctgggaacaatcttgttctgataaaagcaatactccatgtattatctctgcctgaatattaaccctccaggtccaaatggccctccaacaagatggctcctgctctctctgcacagcacctgtcctcccttgctagttgattatctgggttgttactgactcatgtctgtcctcctgctagaccttagagttttccaaggcagggcctacatgtctctctctctctgtctctctccctctctatctatctatccgaaacagagttttactctgtcgcccaggctggagtgcagtggggcaatcttggctcactgcaacctcctccacccaggctcaagagattgtcatgtctcagcctcctgagcagctgggattacaagcatgtgccaccacacctggctaatttttgtatttttgtagagatggggtttcgctatgttggctgggctgttctcgaacttctaacctcaagccatcctcccacctcatcctcccaaggtgttgggattacaggtgtgagccaccacacctgacctatttatttaagagacagggtcttgctctgctgccctggctaaagtgcagagtgcaatggtgcgataacagggactgcaggcatgtgccactctgcctggctaattttttaatttttttttttttttttggtagaggtaacatctcactatgttgcctaggctggtcttgaactcctggcctcaagcaatggtcccacctcagcctcccaagtcactaggactaaaggcatgtgacactgttcctggccaatgccatttttttgacaggcatgaagggcagctctgacaacagtatatcagctgtgctcaactttgatttaaatatatttaggcccctgggtttgcctttgtgctaacttgttaaaaacatattttttaaaaagtaaaacatatactttgcaaaaaaaaaaaagagggagagagtgaagataaaatataaaatgccctgtgattcttccagcaagattgctttggctgttttcttagaaatgtttgatgcccaggctgggcgcggtggctcacgcctgtaatcccagcactttgggaggccgaggtgggcggatcacgaggtcaggagatagagaccatcctggctaacacagtgaaaccccatctctactaaaaatacaaagaattagccagatgtggtagcaggcgcctgtagtcccagctacccgggaggctgaggcagaagaatggcgtgaaccaaggaggcagagcttgcagtgagccaagattgcgccactgcactccagcctgggcgacagagcgagactctgtctcaaaaaaaaaaaaaaaaaaaaaaagaaatgtatgatgcccaaagaaatgcttgcagatcccagctctgagctgcaggcccacatgggtaaagaaacacaggctttggctaagcatggtggctcatccctgtaatcccagctacttgggagactgaggtaggagaatcacttgagcccaggagtttgaggctgcagtgacatatgatcatgccactgcacgtctgcctgggcaacagagtgagatcatgtttcttaaaacaaaaaaaagtaacagaggctcattatggaacaaatggaaatgtagaaaaactgaaataagcctaggcaatatggagaaaaccccatctctacgaacaaaacaaaaaattagctgggtgtggtggcgtgtgcctataattccagcattccagaggatcaccggagcccaggaggtcaaggcggaagtgggccgcaatcatgccactgcactctagcctgggtgacagagtaagatcatttaaaaaaaaataaaaagaaaaactgaaacagaaaggaatggaaaaacccaacaatgtctccctactttgcaacagccactattaacactggtatatatctttattttgctctctaaattagaagtcagaggaaataaggctgtgatcacagcacacactctacttcttccatttcctactgtagcacaccatcctgctccaatctcaaattcctcacatacgctgctttttaaacccgcatgacgttccaccatatggatgtacccaatggtgcaaaaagctcatggagtccacagggctagcctttttcctttaaataggagaaaggaataatttttagttcatcagaactaaaataacctaaatacatcaacaaggggcactggttaaataaattacgggccatccacagggaagatggggcagccctgaaaagttgaaattttagacaagcaatcaaatacaatgttaaaggaaaaacaaggccaggcgcggtggctcacgcctgtaatcccagcactttgggaggccaaggcgggtggatcacgtggtcaggagatcgagaccatcctggctaaaacagtgaaaccccgtctctactaaaaattaaaaaaaaaattagccgggcatggtggggggcacctgcagtcccagctactcaggaggctgaggcaggagaatggtgtgaacccaggaggcagagcctgcagtgagccgagatcgtgccactgcactccagcctgggcaacagcgcaagactccatctcaaaaaaaaaataaataaataaaataaataaataaaaaaaaacaaaaggacaggctataaaacagtatctacagtgtggttctacttacatcaaaatacatttgaattaaaaattgttacaaaggccgggtgcgggacctcacacctgtaatcccagcacttcggtaggccaaagcaggcggatcacctgaggtcaggagttcaagaccagcctggccaacatgatgaaaccccgtctctactaaaaatacaaaaaattagccgggcgtggtagcgggcacctgtaatcccagtcactggggaggctgagacagaagaatcacttgaacccaggaagcgaatgttgcagtgggccaagatcgcgccattgcactccagcctggacaacagagttagacttcatctcaaatataaaaaaaaattgttagacaaacacatcgggccaggagcagtggctcacacctgtaaacctaatgctttgggaggccaaggtaggaggatcacttgaacccagaagttcaaaaccaacctgggcaacatagtgagaccccatctacacaaaatttaaaaattagctaggcatggcagtggacatctgtagtcccagctactcaagaggctgaggtgggaagatagcttgagtccaggaattccagactgcagtgagctatgatagtgccactgtactgcagcctgggtgacagagtgagatcctgcctctgaaataaaacaggcccggcacggtggctcaaggctgtaatcccagcactttgggaggcagaggcgggtaggtcacctgtggccaggagttcaagactagcctggtcaacatagtgaaaccctgtctcaactaaaatacaaaaaaatggccgggctcagagacttatgcctgtaatcctagcacttagggaggccgaggtgggaggaacaacctgaggccaggagttaaagaccagcctggccaacatgatgaaaccccatctctactaaaatacaaaaattagccgggcacgatggtgggttcctgtaatcccagctactcgggaggctgagcaggagaatcacttgagcccaagaggcggaggtcgcagtgagccaagatcacaccactgcactccagcctgggcggctgagtgagactctgtctcaaaaaataaaataaataaataaataaataaataaataaatagccgggcatcgtggcgcacactggtaatcccagctactcgagaggctgagcaggagaatctcctgaatccaacaggcggaggttgtagtgagccgagatggcaccactacactccagcctgtgtgacagagcaagactcgtctcaaaaataaataaattaattaattaaataaaattaaaaaaaacagaaaaacacctcaacactcaaccagtgcttgtctctgtgttgcagagttatgagtgactttggttttttgtttacccctcttctacttcctggatttcctaccatgtacatgaattacctttaaagtttaaaaaaagaaggagtagaagtaattttatatgaaaaagaaggttcaatgttgacactaaacaaccaggacattctgggcacccctcagttcctgggcctgcccccatactcacaccctgagcacttcactcaggagggaccaggaagaggtagggacaaggaaagacaagaaatcacattcaggctgcagagtacagcgaacggctcccacctgaaaaccactggtaacaaatactgggagataaaaatgctggttcttggccgggtgcagtggctcacgcctgtaatcccaacactctgggagactgagaggggcggatcacctgaggtcaggagtttgagaccagcctgaccaacaaggagaaaccccgcctctactaaaaatacaaaattggctgggcgtggcagcgcatgcctgtaatcccagctacttgggaggctgaggcaggagaatcgcttgaaacttggaggcagaggttgtggtgagctgagatcgtgccactgcactctagcctaggcaacaaaaaaagaaaaagaaagaagaaaaggcaaacgctgctgggtgcagtggctcacacctgtaatccctttgggaggccaaggtgggaggatcacttgagtctaggagttcgggaccaacctgggcaacataacaagacctcatctctacaaaaatagaaaaaaattagccaggcatggtggcacgtgcctgtggtcccagctacttgggaggctgaggcaagagaactgctaaagcccaagagctcaaggcttcggtgagccatgatcccaccactgcactccggcctgggtgacagagcaaaaccctgtctcaaagaaaaaaaaaaaggaaaagctggagctggaacaaggccttggggaaggttaacacactctacactccagaccccagaggaaggggcctgcctctcagattatcaatctccagcctgaaaagcttggatctggtcaccctcatcacaacatcaccccttgatcaaaacccttggtgccctcagtgtttctcaggacaggcaagtggaaacccttgctgagctatcatccacctgccatccactaagggacagcccctttggtacagcagctcaggctggccctccacatatgggctctctccccttcctgccctctgctgggcaggcctttctctgcttcctcagtgggccagctccacctgggctttcaggatgcaaagctctgtggccttactgtggccacggggcctgggaacacactgcctttgttatcttccaggagctctggggcggcacctgcatccctttgccagtagtttgtcaccccataagggcagaggtttttttttgttttttttttgagacagagtctcactctatggcccagggtagtgtacagtggcacgatctcaactcactgcaacctttgcctgccagatcccagagattctcgtgcctcagcctcctgagcagctgggactacaggcacgtgccacaatgcccagctaattttttgtattttttagtagagatggggtttcactatgttggcaaagctggtctcaaactcctggcctctagtgatcctctgtctcagcctcccaaagggctgagattacaggtgtgaggcagcacacctgaactcaaggcagagatttttactctgttataccccttccctctgcaccacagctggctggcagtaaataactgctgagtggatgagttggcaggctgtcctctgggcttccacatacccctcatttctctcttgccacagtgagcctcccaagggcatctgggtcattccttggatcatcaggctatggctgggtgcaagcacatgctgactgccctcacaagccaaaccctgtgctggtgaccctcaaagactcacatccaggccccatccaggccccagcaggcacttactcgccaggatgtgggggctgagggctggccacctgattctgcttggctttctgttccattttggcttcaatttcccgtttcttctgagcgatgagctcttcctggtgaaggatgttcatgttcatttttccagatttagggggagcaaccccaaaccaccggttagcctttcctggggagggaaaaggagtacgtcggaaatcacccttactccacaaacaccccaagaagctgtgacaggccagagagcaactgatgttcagattaatttatatgtctattagttcatttattcagcaaacacttacagagtgcctgctgcataccataccctgtacttactacgtgctatgcaagagaacacaggtctctgcccacgtgggactcgcttcaggctgggaagacaatagacccataataaaaaagtaactttcgggctggtgcagaggctcatgcctgcaatcccagcactttgggaggcaggggcaggcggatcacttgaggtcaggagatcgagaccagcctggccaacgtggtgaaaccctgtctctactaaaaatacaaaaattagctgggtatggtggcatgtgcctgtaatcccagctactagggaggccgaggcaggaaaattgcttgaaccagggaggtgaaggttgcagtgagccgagatggtgccactgcactccagcctggcaacagagcaagactctgtctcaaaaaaaaaaaaaaaagtaagtgcacaatgtggtaagagctctgctgaaaaccaaaaaagggtgaaaaagtaacaggagagtacatatgcaggtaggacaggcagaaaataaacactagaagaggagacatttaaaccagaaaaaacaaataagaagccagcgtcatgaaaagccaaatgggagatgatctgggcagaagaaggagcagatgtgaaagctcaaggcaggaagaagcctggtacatccaaggagcagcaagtgcccagtgtcagaggggcctgctccagggacaggcagaggtgaggcatgtcagagcatctgtgctttattataagggctttggggagtgatggagaagcactaagatgaagaatgcaagatccattgggtctttttttgagacagggtctggctctgtttctcaggctggagtgcagtggtgtgatctcagctcactgcagcctccgcctccccggctcaagcaatcctcccacctcagcctcccaaatagcttggattacaggcatgcaccacctcacttggctaatttttaaattttttcatagagatgaggtcttgctatagtgcccaggctggtctcaaacattctttccaccttggcctcccaaagtgctgggatttacaggcatgaggcaccgtgccccagtggcttttttttttttttttttttgaggcgaactgttactctgtcagccaagatggaatgcagtggcaccacctcggctcattgcaacctccacctcccaggttcaagcgattctcctgcctcagcctcctgagtagctgggattacaggcgtgagccaccacacctggctaatttttatatttttagtacagttaggatttcgccatgttgtccaggctggtctcgaactcccgtcctcaagggaacctccaatttacgcctctcaaagcgctggaattacaggcgtgagccaccgaacccagccttctttttttttttttttttttttgagatgaagtattgctcttttcccccaggctggagtgcaatggcgcgatcttggctcactgcaatctccacctccagagttccagcgattctcctgcctcagcctcccgagtatctgggactacaggcatctgccgccatgcctggctaattttttcatatttttagtagagatggggcttcaccatgttggccaggctggtctcgaattcctgacctcaagtgatccacccacctcagcctcccaaagtgctgggattacaggcgtgagccaccacacccagccgttttttttgttttgttttgtttttttgagacagggtctcgctgagttgcccaggcaggagtgcagttgcatgatcgtagctcactgcatcctcaaactcctgggctctagagattctcccacctcagccacccgagtggctaggactacaggcacactctaccaggcctagctattttcttttattttttgtagagacaggttcttgctatgttccccaggctaatcttgaactcctgtcctcaagggagcctcccatttaagcctcccaaaatgctgagattttaggcatggatcaccacacctagccaatatccacagggtcgttttattttcatcctggctactaggtaatcattctggccagagaatccacaggcaacaagaccagggaggctcactggctccaagcaacagacaatgatgtcttcagactagggtgatagtatggagacagggaagacacctcagaggttccccatgggactcagaataaaatccaaattttaaaagtctgagccgggcatggtgactcacacctgtaatcccagcacctgggaggctgaagcaggcagatcacttgaggtcaggagatcgagaccagcctggccaacatggtgataccccgtctctactaaaaatacacaaaaacactggccaggtgcggtggccggcgcctgtaatcccagctactcaggaggctgaggcagaagaatggcttgaacccgggaggtagaggttgcagtcagccgacatcgtgccactgcactccagcctgggcgacagagcgaaactccgcttcaacaaaaagaaaaaaagaattctaaaaggccattttcaaggccccgccagatggttcccctcccttctgcttcatccttgacattcttcaaaaggacaagcccatcctaccagggcctctgcatttactggcccccctctgtgtggaaggctccaccctccagggattcccatagctggcattcattgtcttaactcaaatgtcctctgcttgaaaaggcctttccctgggccaggtgtggtggctcacacctttacgtaaccccagcactttaagaggctgagatgggaggatcgcttgagcctaggaattccagacctgcatgggaaacgtggcaacacaaaaaacacacaaattcgctgtgtggtggcgcgcatctgtggtctcagctactagggaggctgaggtgggaggatcacctgaacccagggagccacagtgagccactgcactacagcctgggcgacaaagtgagaccctgtctcaaaaaaaaaaaaaaaaaaaaaaagaaagaaagaaagaaaaggtctttcctgactacccaatatcagaagcctccactctgatcatatcatacgtaacctcacatcatacgtaagtttttgtaaatattttctcattaatgcactgacaccccagtagaaagcaacctccaggaaggcagggccctgtttcggtcaccgctgcatgcgtagcgcccagcacactgcttggcacacagtgagcacgccctaagtatctgctgatgggtaaatgcattctattctggggaagcagaaaggccaaggcttgcagcaaagtgagggtcaaaagacgcgggaaagtgtgtcaagggagcctcaaagcacttcggaaaagcagcttttccagaaagcgggacacaggccagaggccagctgcgacgaaaagaggggtgcagggacagcccaaggttgtcgccgtattggggaacggaggttggagcagccctgaaggcggttgtttcggaaacgggacgcagggccgagccgggtggcggcctctacggagatccgtgcgtcctcagcaaaccaagcgggggcggccagcaacctgggtctggggtctcgagaaaccaagaggtgcagaagccgacgctgtgggctgccccggggctgaagcgagggatccacgggtcgcagcaggacggacccgaggagtcaggggagacacctagccccagggacccaggcggccgcctgagaggaggcgggggctgttacctgcaacatcccggttgtccatcttgagactcatccaatcccacaatgctccggcgccccttaaggggccctgttatagtgtgcatcgcctgatgggagatgtagtccgcctcggtcagactcgccctattactgcgtgaacgactgggtttttttttttttaacctccagaaacggaagcctcagcctatcagcgatgcctaagtcccagtcacgataaccaaacggcgtcgcccttttacaccttcccggagcggcagtcatcccaaatacaaactacatgttccaggatgctttgggcggcagatctcgcggaagccgcgaggagagcccggccccgtctcgcgcgcctgcttccgcctccctgtggcggcggcttgttgttgtggaggccaaaatggcggctcaggcggcggcagcggcccaggcggcggcggcccaggctgcgcaggccgaggcggccgactcgtggtacctggcgcttctgggcttcgctgagcacttccgcacttccagcccgcccaaaatccgcctgtgcgtgcactgcctgcaggccgtgttccccttcaagccgccgcagcgcatcgaggcccgtacacacctgcagctgggctccgttctctatcaccacaccaagaacagcgagcaggcgcgcagccacctggagaaggcggtgagcgcgggccgggccgcgagggaggagtcgcgggctccttgcaagatctgggctgacgggtcgcgaccgcggcgggtggggggccgctcctcggcgacctgggggcgcgacctccgtcaaagccgcaggacccccacccgcctctgccggaccccaaagccaccagcctctcaagggacacgaaagcctcgccccccacgccttatttcccgtttctggtgacagggctccaggagccccgtcaccgtactctgaaagttgcctgttattgggagcaacaggatccgcaaatcgtctggttttcaggaggatcccacctgttggtggcgatggggacatcacagggtcctgaagctattagctcctcctggttcagcttccggagcatcagccccaaacgcttccacctaaagtgacttggggtaggggttggcgaaggcgagacccctggcattctcccgggaatctgaagtctggtctctcaggaacctggaagggcatgattctccttggacacagaagtttggtaatcgtggtttttggagggtcttgtgcccccatcaataatgcctggtgtcgtacgagggaagctgagacccggagtctggagttggtcatttgaggcctatgaggaggagaaacaggggttctggattccaggccccgctgttcagtttcagtattaggggaactaaaagcagctcctgctttttctccatccactggtgacttctaccatccatcagtccatcctcttccgtcagagtgagtccctcccctgacccaacttgatttgtgtcatcttggtgcctcaaagaatgcgggagagtggctgtcattctgccctttagtaaactttctttttttttttttttttgagacggagtcttgctctgtcacccaggctggagtgcagtggtgccatcttggctcactgcaagttccgcctcccgggttcaggccattctcctgcctcagcctcctgagtagctgagactacaggcgcccgccaccacgcctgcctaattttttgtattttttagtagagatggggtttcaccgtgttagccagggtggtctccatctcctgacctcatgatctgcccacctcggcctcccacagtgctgggattacaggcttgagccaccgcgcccggcccctttaataaactttctagggccaggctcagtggcttatgtctgtaatcccagtattttgggaggcggaggcagacagattactagaccccaggagtttgagaccagcctgggcaacacagtgagatcccgtctctacaaaaaatacaaaaactagctgggcgtactgacgcgggcctgtagtcccatctactccagaggctgaggtgggaggatcagctaagccccgggaggtcgtggctgcagtgagcagtgatcacgccacttcactccagccttggtgacagtgaaaccctgtctcagaaaaaaaagataataaggaaaaaataataaaatttcaggctgtggagtcgtttttttctcacagcagcgctgtgatcctgtcagacccctgcctcccttttaccttttacccagctctgtcctgcttgaatagaaaattattgaaaagaatcaactcagattttaaaaactcattaatctgaggtaaatccaagcccaccctcagctagtaacaacttgccttgaggaatagatcaaatctttgtttcacagactgaaaagttggaaggagactttattttattttattttatttatttgtttattttgagacggagtttcgctcttgttgccggggctgtagcgcaatggcaggatctcagcccactgcaacctccgtctcccgggttcaagtgattctcctgcctcagcctcccgagtagctgggactacaggtgtgcgccaccacacccagctaatttttgtatttttagtagagacgggttcacagtattggccaggctggtcttgaactcctgaccttgtgatccactcccctcggcctcccaaagtgctgagattacaggcatgagccactgcgcccagccccagataattttttttcttttttttttgagacagattctcgctttgtcaccaggctggagtgcagtggcgcggtcttggctcactgcaacttccgtctcgtgggttcaagcaattctcttgcctcagcctcccgagtagctgggattacaggcttgcaccacatcatctggctaatttttgtatttttagtagagacagagtttcaccatttggtcaggctggtttcgaactcctgacctcaagtgatccgcccatcttgtcctcccaaagtgctaggattataggtgtgagtcaccacatctggccagttttatttatttatttatttatttattttgagacagggtctcgctccatcaccccggctggggtgcactggcgtgatctcagctcactgcagccttgacctcctgggctcaagcagtcctcccatctcagcctcctgagtagttgggaccacaggtacgcaccaccacacccagctaatttttgtgttttttgtaaagacaagggcttgaactcctgagctcaagccatccacctgcctcagcctcccaaagtgctggaactacaggcttgagccattgtgcccagcgtggaaggcaactttagtcctcacttgatcaactgccttgtttcaaaagggaggcattatgggcccagagaggtaaagtgatttgcccaaggctgcacaacaagttattgacaaaactaggctcaaactccagctcagtgataaccaggttacatgccaagatgatacatcattattgttttggtgaagttttttttcctttgattcattcaacagatacttgttcagctcatgcaggatgccaagccctatttttggtgccgggggatcagcaatggctaaaacagtttctgcccacgtaagcctaggttttcatgaggaagacaaatgataagcatatagtaagaggttaggcagtgatggaagaaccttgagaactgaaccagggagaagagatggagttgacttggagctatttttggcagaggtagtgagagagtctctatttgtgggagtgacatttgagcagaggcctgaatgggtggggcagggagcctggagaaccactcggggggtcaggttgatggcaaggagtgcctaagctgtcggggactggcagatggtatcagggtctctccagggtcatgatgaggctgagatcaaatgaggcaccagactttattgactgggaggggtctggtggcccagcatctccagtggatgtgctggttctaaaactctcctttctctccatgaacaactcccaccacctgccttcccttgtctcccagggctgttcagcctgtttctggcagtggctaatagtcactgtgtgtactgtcgtattttgcccactcagccctgtctaggagaagcagtcatgctgcaaattgctcgctttaccacttggcttttggacccataatttaaacccttctccttgcgaagtgcctttgctctgtcaaatggaactttgaatcttgaagggtcttccactgagccacatggtgccctctgtagctcacgccaactttatgcctggaaatcccgttctttttgtcagtcgcatcccaactgaaaatttttccagcttttagttaaagtaatgttttctatactgttttccttccaccaacgtttgtgaattttttttgtgttacaacataagcatgctttctttcatcttcattctttattaattgtgcattttttcccaatcagggagctatcaacttttattctttccttccccagagctacttaataaagaatcgtatgttctccgcttagaggtggtttgctggtttctacttctgaaaagcaaatggctgaagagattccagtgtcttcttggagagccaacccagtgtaacagtattttgcaatagtttgtgacatttctccttgctcattctctctgctgttctttttatttttattgttacttttattttatttatttattttttgagatgtagtcttgctctgtcacccaggctctggagtgcaatggcgcaatcttggctcactgcaacctctgcctcccgggttcaagcgagtctcctgcctcagcctcccaagcagctgggattacaggcgcccaccaccacgcccagctaatttttgtatttttagtaaagaaggggtttcaccacgttggtcaggctggccttgaactcctgacgtcaggtgatccacccgccttggcctcccaaagtgctgggattacaggtgtgagccaccacacccagcctattttatttttcatttttttgagaaggagtttcactcctattacccaggctggagtgcagtggtgcgatttcagctcactgcatactccacctcccgggttcaaacgattctcctaccacaacctcctgagtagctaggattacaggcatgtgccaccatgcccagctaattttgtatttttagtagaaacaaggtttcatcatgttagtcaagctggtctcgaactcctgacctcaggtgatctgcccgcctcagcctcccaaaatgccgggattacaggcatgccaccacacccggcatctctctgctcttcttcactgaactaattttctctaacataagtgcttaggtaaaacctattattggcccctgaactcagtgctacatccagctttcctattgttttcactgtcttttgctttctctctaagagaccccagcctccttggtcatcacatttttatttaaggttatttctcttttatctgcttctgtcagtttctaatggtctcctcaactgcatttttttttttttttttttgagacagagtctcactttgttgcccaggctggagtgcaatggcgcaatctcaaatcattgtaacctccgccctccgggttcaagcgatcctcccacctcagcctcctgagtagctgggattataggtgtgtgtcaccatgcctggccctcaactgcattttaagtcgtctagaaagatatataacatacttactcgtctacttcatcaagtcaactaactttgaaagaatcatccattaaatgtccccatcaggccaggtgtggtggctcacacctgcaatcccaagactttgtgaggccaaagtgggcagattgcttaagcccaggagttcaagaccggccttggcaacatagcaaaaccctgtctctaccagaaaaaaaaatatagccgggcgcggtggctcacgcctgtaatcccagcactttgggaggccaaggtgggcggatcacgaggtcaggagatcgagaccatcctggctaacaaggtgaaaccctgtctctactaaaaaatacaaaaattagccaggcgtggtggcgggcgcctgtagtcccagctactcgggaggctgaggcaggagaatggcgtgaacccgggcggcggagcttgcagtgagctgagatcgcgccactgcactccagactgggcgaaagagcgagactgtctcaaaaaaaaatatatatatgtatatatatatatatatacatatatatatatatacacaaaaattaaccaggcatggtggcacatgactctggtcccagctactcaggaggctaaggcaagacaattcttgagccaggaagttgaggctacagtgagctgtgatcgtgccactgcactccaccctggacaacagaccgagaccctgtctcaaaactttaaaaaaagaatccccatcagagtcaaagagggtatgtcttcctttcctcagcaactttttaaaaatttgattgtatttatttttatattttctatagagctagggtctaactgtgttgcccaggctggtcttaaactccgggcctcaagcaatcacctgccttggcctctcaaagtgctgggattacaggtgtgagccaccacacacagcctccccaggagctttttttttttttttttttagatggactctcactctgttgcccaggctggagtgcagtggcgcaatctcagctcattaaaacctctgcctctcaggttcagactattctcctgcctcagcctcccaagcagctgggattacaggtgcctgccaccatgccaggctaattttttctacttgtatttatttatttatttatttatttatttatttatttattttgagacagagtctcgctctgtcgcccaggctggagtgcaatggcgcgatctcggctcactgcaagctccgcctcctgggttcatgccattctcctgcctcagcctcctgagtagctggaactacaggcgcctgccaccacgcccggctaattttttatatttttagtagagacggggtttcaccgtgttagccaggatggtcttgatctcctgacctcatgatccacccgcctcgacctgccaaagtgctgggattacaggcgtgagccactgcgcccggcctctacttttattagagatggggtttcactatgttggccacactggtctcgaactcctcagcagcttttttggggtcacagtagttggtgtctcggtgactcttgcctctgtagggcctcagaacacctgccggccgccttgttccctgggtctgctcagcagattctggagctgttacagtgcatggcaggacactttacctgaaagccttccttctctgagtatggttttggcagtgatgtgggtgtgttttggctgctctgggactcccctaagtaaatagttgatgactataagcattgtcactttacttagacatttcttggctagagaattcgcagtgaccaacctgggcactaccctgtctctacaaaaaatttgaaaattagcgggcccgtggtggctcacatctgtagtcctagctacttgggaagctgaggcgtgaggatcacttgagcccaggaggtcgaggcatcagtgagccgtgttcctgccactgcagtccaatctgggtgacagagagagaccctgtctcaaaaaaaaaaaaaaaaaaattttgcaatgccatttctgcagattctgacaggttgtgttcttctatattttgctttcctcttgttctctctcttcttgctgtacacccatccctgtaagttttcattcttctcctctcttccaggccctatggcttttttcttattttcccacctgtcttttaagcagacagatccatcttggtcatttggacatctgctgttgaatcaagagaatgtacctgcatatccgtttcccccttaacttttttttttttttttgagacagagtctcactctgttgcccaggttggagtgcagtggcgtgatctcggctccctgcaagctccgtctcccgggttcatgccattctcctgcctcagcctcccaagtagctgggactgcaggcgcccaccaccatgcccggctaattttttgtaattttagtagagacggggtttcaccatgttagccaggatggtttcgatctcctgacctcgtaatccgcccgcctcagcctcccaaagtgctgggattacaggcgtgagccaccgcgcccagccacccctttaactttcttacttctgatcacagtcccttttatcccttggcctgggaagtgcaccatcattcttaggttttcctggtttgaaagccacccaggactaaatgccgcctctctggaagaacttactattttctataatccaggcagtcattctttgaacagtggtgttttctgactgcgtatgccatgcttgctttctctgtgtcaatgccatgcgtgctttctctgtggttggaacagggctgctttttaatggtggttttgctcatctgacttagaaagcagctccagactgtgctggtcagatacttaattctgcatccaggtttagcctgagcatctatggttcactttctcagcaagtgattaaatgcttccttttctcttaagacccaacagggctaggttctgagcctctcctcatcaggcccagcgtaagcagttctttcattcttcaggatcacaactgtgtcctgctaaattccgtgtcccatctgcagggagcagagacttgtgcagagctggccgttacgcagtttcatgaagtgatctgtgcttcctcctgtttttgtttctatttccttccctctcactcttgagtcacctctgacttcaggatgtgaaatctgtttaggaaccatcacctcacggttctaccagctggtcccttcctctcccaccccggttcttctacttcctgattgccagttactatagcatcattggcacctactacatgccaggccctgcattggtgcttcacagagcaaggtctccctggatcctcaacaaattaacagggtaaggcccacctcagactcacctgtgatgacacccagccactgcaggagaatgtgcttagccacagtcacacagcagcaagaggccagggaagctgctaaatgctgtgcttccatcccagaggtgttgcaagcaatagggtagtttaaaaaaaaaatgattttgagccaggcatggtggctcatgcctgttatcctagcactttgggaggctaaggcgggaggagtttgagaccagcctgggcaacatagccagaccctgtctcttaaaaaaaaaaaaaaattgaaaaattagccacacatgcctatagtcccagctacttgggaggctgaagtaggaggagtgcttgagcctgagaattcaaggttacagtgagccatgattgcaccactgcattccggcctgggtgacaaaaaccctgtctttttaattatttatttatttatttatttatttattttttatttttttgagataaagtctcactctgtcacccaggctggagtgcagtggcgcaatcttagctccctgccacttctgcctcctgggctcatgtggttcttttgcctcagcttccagagtagctgatgtgacaggcacacaccaccatgcccagctaatttttgtatattttgtagagatggggttttgccatgttgcccaggttggtctcaaactcctgagctcaagcagtccacctgtcttggcctcccaaagtgccaggattacaggcgtgagccattgctcccagccaaccctgtctcttataaaaacaaaacaacaacaggccaggcatggtggctcacgcctgtaatcccggcactttgggaggctgaggtggtagtatctcctgagcccaggagtttgagaccagcctgggcaagatagcgagacccccatctctacaaaaaagtaaaacaattagttgggcctgccaggcgccatggctcacgcctgtaatcccagcactttgggaggccaaggcgggtgcatcacctgaggtcaggagttcgagacctgcctgaccaacatagagaaaccccgtctctactgaaaatacaaaattagccaggcgtgatggcgcatgcctgtaatcccagctactcgggaggctgaggcaggagaatcgcttgaacccgggagccggagggtgccatgagccaagatcacaccattgcactccagcctgggcagcaagagcgaaaattcatctcaaaaaacaaaattagtaggacctggtgagatgcacctgtagtcccagctacttgggagaccgagccaggaggatctcttgagcccaggagtttgaggttacagtgaggaccactgcactccccctgggtggcagagggataccatgtctaaaaactacaatcaaaaaaagccttttttttaaaagttactttggttttaaggaataagaagccttgaaacactcagccctggactgaatcctccaggcaccagagctgtgctggtctggacccttccaccccacttgaaacctgttggccctgttgcaaccctctcttgctttccctgagaaccctaaggtgaccccaggggctgctgatggagacagtcacctccttgccctgctccctgcagcctctcactttggctgctttgctatcataaggaaggaaacataaaagctactttttagcattacaaagttaaaaaaaaaaaacacccgggcacggtggctcacacctgtaatcccagcactttgggaggccgaggcaggcagataacaaggtcaggagaccgagaccgtcctggctaacatggtgaaacccgatttctactgaaaatacaaagaaaaattagccaggcgtggtggcgggcgcctgtagtcccagctactcaggaggctgaggcaggagaatggcgtgaacctgggaggtggagcttgcagtgagctgagatcgcgccactgcactccagcctgggcgacagagtgcaactccgtctcaaaaaaaaaaaaatcacgtagatgaggtagcaaccttgggtaaggcattctacatcctttatttgtgagatggatatatttttctgatttccaaatatatgctacaagtcatacagagggctgggtgaggtggctcacaactgcaatcccagtactttggaaggctgaaatgggacgatcacctgagcccaggagttcaagaccagcctgtgcagcatagcaagaccttccctgtctctacaaaaaaaaaagaaaaacaaaactctaacaaagatacaaaagtgaagtcatttagtaggtgtcagattgatggccctggggaattgactggctcaccctgacaccaggcccatactgcccttcaggaatgtgtgtcctcatgcagagagatccaggtgtcactgatgtcccagtgaagaagcagtggcatttaaagacagggagaaatcccatgccatttagggctttgtgtctgaaaggcatacgcctccgttctgtggccatttgcacttacacagaagccctcactttcctctaatgaactctactcattatccaagtggataaagccatcgttcgatcagcagatgtttcccgagcacctactggatgtcagcttgctgcaggcattgcagccacaactttaaagtcaaacatcatggggcttttttttgtaagagtcagggtcttgccctgttgcccaggctggagtgcaacagcacaatcatagctcactgcagccccaaactcctgggctcaagtgatcctcccacgtcagcctcccaagtaactggcattacagcatgcaccaccatgcctggctgattttttttttttttttttttttttagagcgagagacagggtctcgctgtgttgcccaggccggtcacaaaaagaggggctttatctaatgtcctctgtttgtatgtatttgaagtgggcgataaagctacatgggaaacggatgttaaaaagcgctaggatgtaatttctccagtgccttagagcatcgctaactcacagtggatccacaccttgaacccaatcctctggctcccagtcagcgctcctgacacccactgacgctagtggacgccttccacaagagaatgcttgtatttggagcctttgggcacattacttcccagctcaccagtgctcactgagagcctccccttcctcaggggagatgggatcctctctgtctagcccacccgtggacggacggagctggcagagaggcgagcccgttagcagcaggcatatctggcttgtaaagaagagatgtcttggccagccgctgcggctcacgcctgtaatcccagcacttcgggaggctaaggcgagcagatcacctgaggtcaggagtttgagaccagcctgaccaacgtagagaaaccccatctctactgaaaatacaaaaattagccaggcatggtggcgcatgcctgtaatcccagctacttgggaggctgaggcaggagaatcacttgaacctgggaagcggaggttgcggtgagctgagattatcccattgcactccagcctgggcaacaagagcgaaactccatctcaaaaaaaaaaaagaagagatgtccatggggtcaggagaaatgaggtccagtccaactgtgtgctgaatagattgatgttagccacatcatggccccaaatggagaagggacacaaagctgttgctggccaagcacgatgtccaacgcctgtaatcccagcacctttgaagcccaagacaggagaatcactcaagcctaggaactcgagaccagtctgggcggcgtagccagaccccatctctacaaaaaataaaaaaaattagccagacgtggtggttcgcaccagtagtcccggctactcaggaggctgaggtgggaggatcacttcagcccaggaggtcaaggctgcagtgagctctgattgtactgctgcactccagcctggacaacacagtgagactgtgtctcaaaaaaaaggaaaagctgttgctatgaggagacattgttggacccacatgggcctgagctcggtggcataggccaaagctttgtagaagggggtgtagtattctgaggcatgaagtgactggacatgtccttttgaagtctacccgccacagacatgcacgtgtgggctgtcgtcagctctggggagagcatcccatggccacagactggaaaggaaagcttctccgcccaaagggaggagggggaattcacgtgttgactggtcgccttgcttacctctgctgggatgcagtgacagaaatggggccagctttgtcacaggtgccaggcttagctgcaggtgccaggtttgcaccttgctcacccaggctggggctgctgcttgtgtgtggcagtgctgtctaccctggactgtgtctgaagagctcccccttgccagccccatggtgcccaaatcagaaccaccaaatctcagggttcagggagacctcagcccagctctagtacggctcctctgtcacagtcccctctctcctgtgtgattgggcatcccttccagttggtggccttccagagcttcttgtgttagacccggcttctcagtgggatgcagcagcttctgtggaaaaaagcccccaacttctgctcttctgttgcatcacacacgttgccactgtccccacacacagcctctagctgaggagcctcacctctggggccacacttctgacggcaggtgctggccccgccactctgaggaccccgagcccctcctgtccgtgccacaagaggggaccacaggaggcagacgcttgggctggcagagggcctgtggtctgggctcctgcgtgtgggtgcatgtgtgtcaggggctcgggctctctcccacagctgtcctcctggccccctgtgtcttggcagtagctgctctcgatgcagctctgtgctttcccagtgcctgtgacattcccagctgctgctcacccttgccctagagatctccagccccaaggctgcccccagccgtggatctccaggcctcactggctcctccgcactcccttcgtgaatactctctgctgcatccaggatggtctgaaaactcccatctgggcaggtgctttcattttccacccctgactgagtcagcttccaggggtgacaccagggcattctgaccctcagctaggagtggccgctgttgccgcatgagtggcagagaccatcgggcttcagcctcacctccctggccctctgccttttttatgggcttttcagtgcctggagcacctcctgctcccccttttcctggagaactggcccctcacttcccatacttgccacacatgctgccctgccccatgcagtcctcccacagagtgcgatgagttagggtctcctgctgtgctccggatccaccttccagcaaccaccgaggctcttgtcaggtgcaggttgctctgaatgtgtgtggcacatgcgagtcgctggggacagcgttaggcttgtgtgcttgggaccctgggtggtctgatgggctgtggtcagtggcctggactagcctgggaactgttggaacatggaactttagggcacagtggtccctgagttggagcctgttgtctgaactgccttcctggtgtgcatcttcagtgccatcccgcagttctgcctgtgtcagcccttcctggagccccctccctcccctctgagagactgactttgcttatagccaagcatctttcaaatgcctcttgctcagaaggactaaccttgccccccaagacccattctccagttgaaactgatttctcgtgttatgctttgctgaacgtccttcctctctgcctgacctctgactgccagccctacttccgtgtgacacctgggggccttgctgtggccaggtcacctctgagctctgttcctttctgaagcagctcccacccatgggcctgtggggtctgactccaagtgcgagcccctcctctgatgtcagaagggcatgtcccctcctgcccaggcacccactggggctctatagcttccattcccctggctggattggaggggagtaagcctaccctctcaggccaagcgggccgccttcttgttacctggatacctggcagcctctgttctcaggacaacctgtggaagccccagagcgagccagtaaccaggtgccaggtgtttgcctgagaattaatcgttgttttctttctttttcagtggttgatatcacagcaagtatcctttccgtgttggtatggttccctttaaggaattctccacttaaataaaaagaatgtatcaaagcttgaatcccacctcccgacatgccctgtgagttgaggctcggcccacagagcacctggagtgtcccccacctggccctctgctgcccttgggcgctgtgctcctctttgtgcttctcttcgtaccttgcatccagctccaagccctgccctgcagcaagctcaaggttcactgggggaacaggaaaacttggaatttcagggcaggcagggacgtgtgtgccctgcagaccttggcagggtaggagccccaagctgtggccctttcaaaccgacctttttcgcagtgtctgtacttccttaactggacgtcactagatcccgcagttcgaagatgttaaatttgaagcagcaagtctgttgtctgaattgtactgtcaagaggtaagaacatattaaggtttctgaaagcaaagtgtctctccgtgtcgctaagacatgacagcacattggtaaattggggttccgggagttggaatccctccggctttttttgtttttttggtcggggtgggaggacagggtctcactctgtcgcccaggctggagtgcatggcacaatcatggctcaccgcagccttaaactcctgagctcaagtgatcctcccacctcagcctcccgagcagctgggactataggcatgcaccaccatgcctggctaattttttttatttgttctagagatgatctcgcccaggctggcctcaagcaatcctgcctcgacttcccaaagtgccaaaattatacacaggaaccactgtgcccagcccggtggcttttaacactcagattactttcctgcctcttatgccccagccccagggctttggtgggtagccacctgctaaggagggccagcagcttccttttctacataagactgttggaaagatcagcctgttcctcacctgacaagtctgtacagtttctcttcttaatctggttcctaatttcaattgtagccgaaatctgccttcctcccacctcagaatgatgacgggtaaggtggcattggcagcagggaatgtgtgtgcttcacaccctgatgcctctctctggtctgagaacataaaagaagggaactggcgtctgatttgagtgtttagaattttgaactgaaactactttcagtccagttgaatgagaagttattttaagagtgatgcagaaacttcccagccagtgagtccaataaaatatctttttttacttttaataaagtaaattggcaaccccaaaaaatcctttggtaagcatgaacaggaactgccttctggcaccacagctgctgctaaggaatccagcttgattgccgccttgttttttttttttcttacattcccaaacgtgactatttcctttcagaattccgttgatgcagcaaagccgctgctgcggaaggcgatccagatctcacagcagaccccatattggcactgccgcctgctcttccagctcgctgtgagtaccgcggcccgggaacgagggtgcccggcagggaccatgaccctggggcacacctgccccatttgcaaagaacagcagagtccacgatgcgcagaccccctcgggctggcacatggagtaggtggggacatgggaacatttccttaacctgcacacaagcccctttcagcctccatccttgagagcatctctggcttgagcctggctctcggcaacacccaggggtgagtggtgggagtgcggggcttccccggggccaacactgacagcgggcctgctgcttgttgggtgtctttgggttcccctccctcccagccgttctcatctcatctttggcctgcactcattgaaatcccaggaacatttcctgccagagacccactgtgggttttttttaggagctacactgagactccaaggggctgcctatcaggccacaaatggccatgtcaagcattgtgtcccacatggggcccctcacgttggaggctgctggggcacaccctcatcctgggatccacacagttcctcctcatgctccctttggcccccccagatataggtgaagccctggtctctgagctccacagtgctcggttgttgggggactctgaactcggccttcccggctgcagtggaggggccggcaggctccaccacgtggggcacctctcctgtcctgggctccacccatacttctgcactggggaccctcaggcgggtggccggcccccggcctctctcttccatgacccagcctgccttccgggccaccacttagccacctcccatgacacctatgcagtatgtggaccctgggttgggagttcctccagctgagtccctcaccccaggagggtctggctgagaaaagtacgcacagggaagagctcccccagcagccaggagttcccgaggccctcctcccccaggcctgatgagaagctgcatacacatgctgtgtccttccatctccccacgcactcttgtgcccattagcagacaaaggagcaggccaggccgtgagtcacctcccctgggccacagagttggcaggcaccatgtgcacgcacacccaagggccgagctcttcaccacagccccataggtattgccttgcagggtcaagccaggcatgtgcctccctttcagcctgttcagactttgacacttgcctctgagggagtccctccttgtcggccctggaacacactagggacaccccactgaagacagaccccacaaagcactcagaacagccttaggtgctcacacagccttgggggtctgtgccgtgagccttggctgctggttctatgctccattaagtttagatagtgtccactgcaggcaccattcagtttagatgacatatatactacaggccaactggagctgtgtacccaaagcaattagcgttgataagataatttggttaatttagctcaaaactgacacaggcagtttcactgacgtggggaggtttggttgagtttgctaacagagcacgaaggcaggtaccgtaaaactgatgggtttggcagcaaaggtcactgctctctttcctttttagcaactgcacacgcttgagaaggacctggtgtcggcctgtgacctcctgggtgtaggggccgagtacgcccgggtggtgggatctgaatacacacggtaggcacccactcccctccttccctcctgctctgttaacaggaggggcttggccatcttggtccaggacaaataacagaaatggcatttcaggtgaagtacagtagctcacagtatattcccagcactttggaaggccaaggtaggaggatcacttgagcccaggagttcaagaccagcctggggaacatagtgaaaccccatctccacaaaaaatacaaaaattgggtccgggcacagtggcttacgcctgtaatcccagcactttgagaggctaacgtgggaggatcacgaggtcaagagattgagcccaccctggccaacatggtgaaacctgtttctactaaaaatacaaaaattagctgggcgtggtggtgggtacctgtaatcccaggtactcgggaggctgaggcaggagactagcttgaacccgggaggcagaggttgcagtgagccaagatcatgccactgtactccagcctggcgacagagcgagactccgtctcaaaaaaaaaaaaattagtcaccatgaggcgcgggtttgagcctgagttcaggcacccaagcctgcccactggccccaacgctgtgtgtccaccgccgcgtttttttttgttgttttttttttgtagagatagggtctcaccatgttgcctaggctggtctcaaacttctgacctcaagtgatctgcccaccttggtctcccaaagtgctgggattataggcatgagccattgcacccaaccgccttctgggcttttcacgtgagtgcgtctaagccatgtaagaaaaataaatacaggccaggcacagtggctgacacctgaaatcccagcactttgggaggccgaggcaggtggatcacatgaggtcaggagtttgagaccagcctggccaacatggtgaaaccccgtctctactaaaaatataaaaattagccaggcatggccgggcgcagtggctcacacctgtaatcccagcactttgggaggccaaggtgggcagatcacgaggtcaggagatcaagaccatcctgtgaatggtgaaaccccgtctctactaaaaatacaaaaaattagctgggcatggtggcgggcgcctgtagtcccagctactcaggaggctgaggcgggagaatggcatgaacccaggacgcggaggttgcagtgagctgagatcgcgccactgcactccagcctgggcgacagagcgagactccatctcaaaaaaaaaaaaaaaaaaattaaccaggcatggtgccaggtgcctgtagtcccaggtgctcaggaggctgaggcaggagaatcgcttgaacccgggaagcataggttgcagtgaatcgagatcacaccattgcactccagcctgggcaacagagtgagactctaagaaaaaaataataaaaaaaataaaaacaggccgggcgcggtggctcacacctgtaatcccagcactttgggaggccgaggcgggtggatcacgaggtcaggagatcgagaccatcctggctaacacggtgaaattctgtctctactaaaaatacaaaaaattagccgggcgtggtggcgggcgcctgtagtcccagctactcaggaggctgaggcaggagaatggcgtgaacctgggaggctgagcttgcagtgagctgagaccgcaccactgcactccagcctgggcgacagagcgagactccgtctcaaaaaaataaataaataaataaaaataaaaataaacacagacacaataggataaaacagagcagtcttgtaaggggactgttctctgttgtccactgaactgtcccctgaggtggcatattaggtcctgtgagccttggggtaatcacagtcatcccaggaggctcctgggcctgctaggacctgacccctgcctcttgttttgcagggcgctgttcctcctcagcaaggggatggtaagttgaggctgggcatggctggatgcagctggtgttgtggaggtgaggcagggcccccacagagtctgctcagaccccacccactctccatggcatggccccttaggcgcccagacccttaggcacagtgagcagcctggaatgtgaggcccgggccctgctgggttcaggagggaaactcaggctgcaccctatgggattcatgctgaggcaagagcctggttaggagctgcctgggctggggtttcaggctggccttgccctctggattggtggcagcagtcccagggcaggtgggcaggtgaccctgtgctcccggtcctgggagggcccctgcaagccctgtaccctacacctgcgcctctccctccccagctgctgctgatggagcgaaagctgcaggaggtgcacccgctgctgaccctctgcgggcagatcgtggagaactggcaggggaaccccatccagaaggagtcgctgcgtgtcttcttcctggtgctccaggtcacccactatctggatgccgggcaggtgtgtggcgcctctcaggcgagctgctggttgtgaccagtgggtatgggtggtacccaggccaatgggtcttgggctgtgaggtcagctgtgtcatcgccttaccttgccacacaacagggctgtcataccagtcccggacacacacactcctgtcctgctctgccacgagtgctggtatctgggaacagggtctgtcctggccaccccacctccctttgggagtactatgtgtgacattgcatacactcgctcagtgtatggatgctcagagattccaatggcagttcagggaatcatgagaataaaccacagaggtgctgggatggcacctgcacacagcagatgcccaggtgctgtctgtctggcccccggctgtggggttgagtagggactgatgtgctcagccatgtccgagactggactcatgaccctgccgtgggtggggagcggctgtgtttgagctccttgtctctgtgcttgtgtgacagtctcagcccttcgggggctgggggctgccctgtgccactcagacccacccctgtcgcagtgggccacaggcgagtctccacagggcttggtaagggggttgcccagttcgtccatccatacccatcgttgcccattgggtgaagcactgcactcggcgcatagggacacagagcagactgcagccacgcttccctcagggtgcaagggctgcagagacatccctcggggcctcagggcgagatggaccacagcgcctgcctgattcctgggccaggaagccacctcccaccccctcagagcacagcctccccctgccgtctcaggtctggctgcgtgaagaccaagtgcagctccagcagggtctggataggcctctcctgggccttggtgttggacccaacactgggcagtggacaagcctcagtcccacagctgcccgcctggctgtgccccatgccccaaaagcctggctgattcatgggagtgcggcaggggcggcttcatcttgcaggaggtggccctggcagaaggggaaggcagatgctccctagaggaaggagcaggggtggctgggctgggcctggcttcctgagaggccaggctcaggtggatgctcgggtgtgggtgctgcacaggtgaagagcgtgaagccgtgtctgaagcagctgcagcagtgcatccagaccatctccacactgcacgatgatgagatcctgcccagcaaccccgctgacctcttccactggctgcccaaggagcacatgtgtgtgcttgtctacctggtgcgtccccaccagggcccgggccagggctgggggcgggggcagggagagggagagggccctggtaacccctgctgtctggtcttgtcgctaggtgactgtgatgcactccatgcaggccggctacctggagaaggcgcagaagtacacggacaaggccctcatgcagctggagaagctcaagagtaagtcaggtgctcggctggccacatggccacagcgacccctggcggacggcctggccagacgctagctgtaccagggcccagtgaccctgtgtgaccgcagcgcccagccaccctgcctggtgggtctcgtcacccctagttgataaatgctggtgtccaacgtcagagcagagcagacaggcctggggtcgggggtacctccctgactggtcaggtcccttgtgcccagtcatgctcagttgaaacaggtggtagctgcttttcccaattattatcagtgttgtgacagggacactcgggatgaggccaggatcagaactcagccctcactgaccaccagcatgtcctttggaggtcgtgagttctttccagatgctcaagtgtctaatccatccagggacctttgactagcacaaacccagagcagacgtccctggctggtatagtgtgcccattagtcggtctgtttgctccctcgtgagtgctgctgggggagaaggcatcagagccaaggcagcccaaagccggataggccctgtgcttctcttattcccatatgaggatggttgcttggggctgttgggaggtggggcccagcccaggtccccctacccgactgcctgaggctctgctgcatggtgtcatgatccagggtggtttccacatttctacatttctagaacctgccatgtccacaagctcttgagcacgtagggtgagggtgagggtgagagccaacccttcttggagcactgtgggaaccaacctctggctccagctccgtctccccacctggacagcaagacacactccttcactcagagggtgcagtggggactaggggagatgacggggtgggtgcctagccagtgtggcaggagacaggaacgaggtgggggcacggtgggctgggggtggcgcctcctctggcctcccctgcatgcttacccctgactctcacccatagtgctggactgcagccccatcctgtcatccttccaagtgatcctgctggagcacatcatcatgtgccgccttgtcacgggtcacaaggccacggcgctgcaggaggtaaggctggaagcaggaggggcgggaaggcccaggagtttgttgggtctcagcagtgtcagacaagagactgaattcgccaagtgcatactggcaggccagcccatcctgctgtctcgctgtcggccagcgttttacagccctgcatgggcaccactgatcagagaatctcatacaaaaaccagtggaggccgggcgcagtggctcacgcctgtcatcccagcagtttgggaggccgaggcgggtggatcacttgaggccaggagtttgagaccagcctggccaacatggcgaaaccccgcctctactaaaaatataaaaattagccaggtgtggtggcagacacctgtaatcccagttacttgagaggctgaggcaggagaatagcctgaacccaggaggcagaggttgcagtgagccgagatcgcactactgcactccaacctgggcaacagagtgagactccatctcaaaaaaaaaaacccaaaaaactaatgggccatggcccaaaagcttgcacaccaaggggatagcgcacatggtctctggggatttggggggtcctttgacagtgattgttataccccaccctgccattaggaacactctacccccagtacccaccctcctgagagggcatgggggccctcagtaggctggaggtcctttacaacccagacacctgttggacagagtggaagagacgagtaacagacaagggtccctgtccacgatgggatctgggctgccctttgccctcatggtggacgtgtctgctggggctttgtaccccagtttggtcagacaggacatgggctcacccaccagctatggggtctctccattgctgctcagacgccaggtcccaggttgcagtcctgtgatggcagtacactctctcccggcagatctcccaggtctgccagctgtgccagcagtccccccggctcttctccaaccatgcagcacagctgcacacattgctggtgagtaaccctgtgacaacaccccgggagaatccagaatgttctcagtaagtaagtacctaaccagatccagaacattcccagtgaaggaccccctgacagcaccctaatcagaatccggaatgttcccataggtaatcatataaccttcccaggcacgatccggaatgctcccagtgagcatcttgtcccaccccacattggcttgggtctgaaaggtggggacagtgagcatattacctgccttgcagctggctcggtagagccattgtcatactcctccagggcagccgtgcaggccccgggcacaccacgtgtctctgatctgagccccctccccaggggccggccctgatgacaacaccaccttcttccagggcctgtactgtgtctctgtcaactgcatggacaacgcggaagcccagttcaccacggccctgcgggtaaggtgccggccctccttgctgctcggggcgggccacacttctgagtaaggagtcgggcgtggtctgtgatgaggacagcagtcgcgctaggtcagctatgcaaagccgcagccccagaggcaatgcacagtagtcagcccatgccagccttggcagtgacgcgctgtttatctggataagggacagctatggggccaggggcttcctgagctgacccaagggcagacgtgagggagaggtgcgacgcgtccggggacaccactttcatgcctgagtgggaacttttgcggcacccacccccaaggctggattggctcaagtgtcagctgacaactcagagccatcctgggttcagggctcccatggggagtggtggagctgggccatctcccaggtgctctttggacagaggaggactcttggtcctgctgggccggagagggtgaagcagcaccccaggctcctggccttagacgggggccccgccaggccctggaagaaggctggtgccacatcctcacggagcgccccagcccagggctggaccattgtgtccccacctcagcctcaacctcctcacaggaaatggaggctgtggacacctttttcctggtggtgccaggaagggccctgaggagaggtgtcagggagcagaggctgctctgtctgccactcgggcaaggtcaccagggagtcctgtgtgcgccctgactgttggacagggttcccattccacggcaccccgcaggcctgtgggtgctgccacccccgccactggcctcagagatgcacaggagccctgacatgcagacagcatgcttgggagggaagggctgactcagcacccactcctctgcctcctcacctcgctcccaggaccctggctcactctgactgcagcagggccaggaccctcctcgtggccctgccatcctgccatctccgtctccgtctcactccccacaagtggttgctattgctggtttggttccgcgtcaaagttcccaaggccatgtaccctaaggagtcctcaccccgaggccaaaagagagcctctttttcatggcccacccaggagtgatggagccaggatgcaaccccaacacccctaaccccaaacacacacgcctcctgtggccctgaaacaaacatctcccaccttgctacgtctcagagcatctgtgcttgattcggaagatcctctgggcctcctgggtgtgtgccaggaggggatctgtgcaggtggggtctgtgcttcctgggctcactccacctcttgcccagccccactgggaaccagggtctgagcagggcttgagctacatagattggaccctctcttgacgaacgatctcatttgccaagaagagccagggaccatggcccatccaccacctgtcatcagcagcatttctggtctctgacacagcatcacctacctggagcggggcctgtgctggccccctgtgggacaacagctcccctcttccccacttccccctatgaagagtgacccccgcctaggaccagcatatgccttgatggcagtggacacctgggtcccacaggttgctggctgtggcctggaggaagggtccaccaggtctcagtcctgagagacagtggaaaatggaccaaaacccgacatgttctgagggtaggattggggtggctggttttcctcttctgtgttctctaactgccccgtaacgcagatgatggttttataatgagaagaagtaatagctgtgttatccttgagcttaggaggcaaaacaagtgtgtttgaaatgaaaagaacaagtcttttccaaagtagtctccgtggagattgtgggtgctctgacactgccacatgggtcacagcacccgacccagccccctaatgtccccgcctcccattccagctcaccaaccaccaggagctgtgggccttcatcgtcaccaacctggcgagtgtgtatatacgggaaggaaatagacaccaagaggtagtaggtgacatgcttcatgttcggtatcctttctctctgttctcttctttttggggaaccagggggttgtcctgggcaccagcacatctcagcagaccccagggtgttcaccttttgagggatgggcggcacccgacacagacacacaaggcgacccagaggtgaatcgggctatggccgggggaggccaggtctgggacaaaaacattcccatagccacagaacacttctctttatcacaaacaaaccaagctgtatgaatcacacagacaaggtcttatagcccaagctgtctgctctaggatgtcggccaggcattgaggctcagtcctaaggggcagcagccagagcaccttgtccccaggttgtgctgatgcccctgcaggatcaggggcactcactggctgcagtgttgggtggggatgcccagggttgccctcacgtggcgcttctgaaccaatgcttgcataagagttaggttccctcttctgtcccttttagccctgggatccccactcagccctgggatccccctcagccccgggatcccctcctcagccccgggatcccctcctcagccctgggatccccctcagctctgggattccctcctcagccctgggatgcccactcagccctgggatccccctcagccctaggatgtccctcagttctagtatctccttcacctctgggggtctacctccaaagtgtatcaggccaggtgcttggctcacacctgtaatcccagcactttgggaagcaaggcaggaggatcacttgaggtcaggagttcaagaccagcctgggcaacatagggagacccccatttctacaaaaaaattttttaaaaacttggtggggtgcaggcctgtggtcccaactactcgggagactgaggcaggaggattgcttgagctagggagattgagggctgcagtgagccatgatccagccactgcactccagcctgggcgacagagcaagaacctgtctcaaaggaaaaagaaagcccagccccggcttagtcatccgatgccatacgtgggctcgcagtgttgaggaggagtttggctcccctgtgcctctgcagctagagggcagctaaattatcagtcagatcacgcccccatcagagcctcccggggtccctgcacctccagagaaatcccacccactcacccccacagcccacagggctcacgggccccagcctgccaacctacccactgccaggccagcccctcagcaccactctgaccatacaaaggccttctggacgcccaggcccctgtcacctactgcaggacagggtggcacaggcagggctggctgagggtgtggaaatcttgcccccggcccttctcaccagaggctgctcttgctggtcagtcaccaggctcagcctggaggccacagtcccgacgggggtgtagagaaattcccatgcactgcagtgtgtcttggggacctttctcctgtgaagatgcagaatggtgctgactggctctttcccccgcagctctacagtctgctggagaggatcaacccggaccacagcttccctgtcaggtgagccgctccaggcaccactccacgcacggcctaggctccccgtgctctttggttggggcccctgactgccccttgcaccctgacaccccatacccctcctcacagacagtctgcagtgggggctctcagaaatagcccccagctgcccactgccgttttgtaaacctgcttctcaaaatcaccaccccatgtgatactgcactctccctgcagctcgcactgcctccgagcagccgccttctatgtgcgtgggctcttctccttcttccagggacgctacaacgaggccaagtaagtgtggggcagagggtggcgtgagggccatgctcagggtagcccaggccccgtcctgcagttatcagcgtccatgttctccttgtcaggcgatttctgcgggaaactctgaagatgtccaatgctgaggacctgaaccggctcacagcctgctccctcgtgcttctgggccacatcttctatgtgctgggaaaccacagggtgagtgccctggcctgggcccctcgcttgggtgcctgtggggcttggctgagggacaggagccggccagcaccctaagggtggcatggcactgttcatcctatgcccctcgaagagcacgtctaggtggatgccctgactcccacagcctgggcaggcagggccagaggagctgggcacccacagagggtgtggggggaaggcaggaggcctgatgggtgtggcctcagacattgggcaggcagagccccagggctcaggggagctgaagccagaaccaaaggagctgccctgagctactggggatgacgcagccaccccatgctatgtgttgacacctgaggggcagagaggtgtctcctctcagccggacttccaaacatatcatccttggccaacacagtgtcctctcagggtacaagtggcccctgggattggtccccacccaaggtcagccagtctctggtgggactggccgcctcagtccttcctgtcaattcctcgcctactctcacccactgatctcacgaggtcttgaattttttttttttttttttttttttaagaagatattttgggcaggcacaatggctcacgcctgtaatcccagcactttgggaggccaaggcgggcagatcacctgaggtcaggagttcaagaccagcctagccaacatagtgaaaccctgtctcttactaaaaatacaaaaattagtggggcgtggtggtggacgcctgtaatccaagctactcgggaggctgaggcatgagaatcacttgaacccaggaggcagaggttgcattgaacggagatcatgccgctgcactccagcctgggcaacagagtgagactctgtctcagaaaaaaaaaaaaaagatgtttttgggacaggcacggtggctcatgcctgtaatcccagcactttgggaggctgaggtgggcagatcacttgaggtcaagagttcaagaccagcctggtcaacatggtgaaacctcatctctactgaaaatacaaaaattagccaggtgtggtggcacacatctgtactcccagctattctggaggctgagacaggagaattgcttgaacccaggaggcagagaggttgcagtaagccgaggtcgtgtcattgtactccatccagcctaggtgagagcaagactccatctcaaaaaaaaaaaggccgggcatggtggctcacgcctgtaatcccagcactttgggaggccaaggcgggcagatcacaaggtcaggagatcgagaccatcctggctaacacggtgaaaccccgtctctactaaaaatacaaaaaattagccgggcatggtggcaggcgcctgtagtcccagctatttgggaggctgaggcaggagaatggcatgaaccaggaaggcggagcttgcagtgagccgagatcccaccactgcactccagcctgggcaacacagcaagactccatctcaaaaaaaaaaaaaaagatatttttggccaggcacagtggctcattgcttgtatccctttgggaggtggatgggggagaatcccttgatcccaggagttcaagaccaccagcctgggcaacctagtgagaccctctttttttttaatttaattttattttttgaggccgagtctcactccgtcacccaagttggagcgcagtggcatgatctcagctcagctcgtggtaaccttcaccccctgtaggctcaagtgatcctcccacctcagcctcccaagtagctggggccacaggtgtgtgccaccatgctcagctaatttttttatttttggtagagactgggtctccatgttacccagactggtcttgaactcctgagctcaagcgatccacccacttcagcctcccaaagtgctagattacagcatgacccactgtgcctggccctagagatgctatctcttaaaaaaaaaaaaaagatattttccagccagacacagtggctcaggcctgtaatcccaacactttgggaggcagaggtggaaggatcatttgagcgcaggaattcaatatcagcctgaccaacatagtagatctgagatcccatctctacaaaaaccaaacaaaaaaattagctgggtgtgtggactcatgcttgtggtcccagctaattgggaggctgaggtgggaggatcacttgagcccaggaggttgaggctgcagtgagctgtgatcatgttactgcactccagcctggacaacacagtgagatccgtctcaaaaaaaaaaagttatttttctagattataaaatatgacatgttcataattaaaaggctgagaagcaaaacagaaaaaaattgcatgtctctgtcatccatcccttcccactgcccacgtctcccacgtggaggttttgcttgtcagcctgtttggtaatttttttttttttttttttttttttttttgagatgaagtcttgctctcttgcccaggctggagtgtagtggtgtgatctcggctcactgcaacctctacctcccaggttccacggattctcctgcctcagcctcccgagtagctgggattacagtcgagcaccatcacacctggcttatttttgtatttttagtagaaatggggtttcgccatgttggccaggcttgtctcaaactcctgacctcaggtgatctgcctacttcagcctcccaaagtgctgggattacagacgtgagccactgggtaattttatatttgcctttctccacacctctgtattggaagcttttttttttttcttaatggcaatgagtgttttgaagccacatctactctgtagtttaaccattctcactgtagccatttccacaggacagataaagcaagatgtgtgtcttggcctgtaaagtttcacgtgatctgagggctccctcagcatggatgctgttaacaaacgtggtgcccgcccaccgcaacacacagacacataactgtgtggtaagcctttgcagaggccagcgaatgggccctgcagctcaggccctggtgggccttggcctcagcactggggatgccactaccccgtcaaaacctgtagctggctccttctagaatgtgctatcaccctgccctcagcctctgagcacagtgagggctgtatgtccccactggacagtgcaagtggcctgggggtgtgtcagatggggaggttaaagtcacacagccccagaccgcagaatcaggactggaacccagacctcactggctctgatttgtgtagaaacccctggaagctgcctggagcagggcaaggagggttgagcagctggttcactgctgctcctggcccatgttttaggtgttgtgggggcatcttacagagctcttttgggaatccccctctgctccctgtgtccctgggcccttgtcgggtgacaagcggcgcccaagaactctcagaccaaggtcctggccttaagtgactccagatctcggggagacacagccagacacagccaagccagtcctgtgaggtcaggctggggacatccagaaaggtggcagccttgggggccgggatagtgttggtgcaggcagggcaaggttggctaggcaggggctgccacagagatgggcaccacagcagtcagagcacaagtgccggagcagacggctgaatggccacaatgggctcaggtgagggtccaggggcccagaagagcttgggatgccctgtcctgagcctgttaggctagagtgtccacaagagcgggacaccccccaggatcactcaagtcttcaaaaccagattctgtggggtaccccaagctggcattgggggaacctacccaggagcgctgaaggaggactctccttccccaggctgctttcagacagaggtccttggctttctacagggagcccagccaggctcacaataagccaggcctagcggaagagagcagtttttcttgctctgaggtttcaaaagggcttggtgaattttaaaaagctccaagacccacctggagctcactttcaaggtgcagctacagggcagtgtagagttgttgggctttgtgtctcaggaggagcatctctgcactctggagaagtatctggtggcgtcaaagccaggtctcaggagttggttttggggatgtgtccatcttggcttcccaagtgctccctgggctgccaggagccatcatctagggaattttccaggtcttacctgaaccccacatccaggcttacagggctttgagtcctcggtccagacagggtcagtccagcactgctggtcgcctgtgtagcacaggctcctgtctgccgtctccaggcccttgccatagcaacagggatgggcatttatgggccctgatggctcttactgagctcttcctgccacatcctgaggatgctagggctgcaactggggtggccctgtgcagtcacaaagcagggagtccggattggaggattcttacatgctggtgcccccagagcccctgcgtgtctgcgggggcctcccatgagagccaactcaattgtggaagacaaaccggaggggctgctgcccttctcagaacctgaaacctggaaccctatatgaatctgcatttctgatcagcccccattgtgggtctagggctaacggccatcagtgctttttctctgcttgaacaggtagaagcccccaaagttgtccattggccatgcccctgtgagggcatgagccagaagtgagggcagtttgtttttcagtgatacttcagagagggccatttgagatgggctctgaggtaagcataggagttcaccagacgcagaaggaggtcacaacctgggctgggttcagtaggtgggttccagattatccccaccccaacctgggctgggttcggcaagtggggtccaggctcctcactcccccttgctgctcttggttgacaggagagtaacaacatggtggtgcctgccatgcagctcgccagcaagatcccggacatgtcggtacagctgtggtcgtcagcactgctgagaggtgagtgcaatggccacccctcttccccagccccagcctggccctccccagagatcaaggctgctgggcatgtcctgctcagccttagctcggactaggcctccgtgggccgcagccccagttctagcatgggtagggggtgctcctcaggagaccctggttgagggcagtgggtgcatttgtggcatccgcttgactcggggtctggttcagtctctataggacacagaggctgcgacttggtatctggtagacttgggctgttagccgtggcgctctcagccttgcttcttcccggaaaggcagacagcagccatacctattgggtagggctggccagctagctctgggagcagggcgggcactcagcgggtatcattgctgttaccgcagctcccccatttccagattacgaaactaaggtccggagactcgcctggggccctggggaggtgacaggagacggggtgctccatgtgcagtgggctgcctggggctgctgcctcaggatgggcattgggcgtcctgccccaatgagcgcctgtttgcctgagggctggccatgggctccctggagggctggcgagaagcctggcattgggctttcactgcccagccagccctgttctgccctatgagggcggctggcgcatgggctttgtgatcccaagacagggctcaggtccagtgacgtgccaggcacccagagatccaccagtgcagctgggacttgaccttagggctccatctgcaccgagtgggagggcctgggcagtgacagggcaaggcgggcccccatgctcatgtcccactctcagacctgaataaagcctgtgggaacgccatggatgcccatgaagccgcccagatgcaccagaacttctcgcagcagctgctccaggaccacattgaggcctgcagcctccccgaacacaacctcatcacggtacgggtgtgggtgttaggggacgggatcaggactagcgggctccccacctgcaagaggaaggggcaccttggctgtatttctcttttgtccaacaaaccctaactcagcctcaggtgatcccttgatgggggagatggccatgggcacccccacccaagcaagggacccaggtgtctcctcggggcccattggactggggcatggagaacagagtcccggctgtgtgagcagcccaaggaaggcagcattccaacctcttcttccctgggaacggtccacagtgcctcactcgcatgtcctctcctccccacagtggacagacggtccaccccccgtgcagttccaagctcagaatggacccaacaccagcctggccagcctcctgtgaggccttgatggggccatccagctccgcagggcctgcgcgtctccggcttccacccagacggcactcaagcctgcccccgaggcgtgcttccttcctgattgtctctagagcttccaagtcctgggaatgtgcggggccagtccctgccctcccaggaggggtggtagccgttcccacctcgcagcaggacccccagtgcagaggctcacaggtggcacacaggcgctgtctctccagagccatccttcagagtggacctcagtgccagtcctgcctcagcatctgggtcacgtcggccaggagtagggtgcaggcctccagcaggtcctaatcctgtgtgccagggcaggcagtgccccaggggcaccacgcctgactctccatcacccaggccttgatgccgagcgggagtagagtgtttcctctgctcaaggcaatttccagagcccggatgccagtttctggcctgaatttggagggaagaagtaatggcgctagtgtgggacgaagcacagatcccagcacttttcccagctttctctccagcatcagtccctgcagcagctggggcctctggtcaggaaccctcagggacccaggaactcagcttccaaacatctgcaccttgaccggactcgccatcccgccgtgggggtgcaggtgattgtaaacacgggtgtgcatgtggatgcacacgggtgtgcggtgaagatctgtggagatggagctgggagctgaggctcctgttgcaccagccaccttcccccatcttgtggctgctgaggggcaggaagcgggggagtgggctcgtctcctaaatttaagatcacctcctcagctagcttagagtgcgtggcacgggccccccgcccccgagatctggagcccagggactttcttcctggcagatctgtggccttccctgctcagcctcttggtccccccactccctccaccgcctcaccttccctgctgggtctctggggcacagtgtgaaacccgcaccctagccaggccccagggagcctccgctgggcccagacagcagcgtttggttttatccacttttcttggataatcaggaggtgccccagtggtcacagtgtggcattccgagttggggcgggtggtcgggtcaagatagcagcagcaggtgtcagggctcaagacaccaccccctccagcttctggggcccaggagcctctccctgctacagggggtgggggtcctgctcagcagggtaggtggtggttttaggtcttgtcaccctcactcagtggaactgcctctgggagctttggcgtctgtgactaaagggacgctggattgctcaggtcagctgcttggggctcccaggctgggtgtgccttagccacaggcagggctgtcaataacccccttcctcactggccaccacctgacatcagcaccagtgacaggctggtcagagggcggggctggtgagggtttgtcctaagaggaccaccgccatctctgggtctccagggggagagcctggccctgtcctttgctacccagggctgcccccaggcccatgaagccaataggagagcgtgtggcactggcccacaaactgtccctgtcctgtcttcctcccgagccatggcctctgctagctccaccttgaaggagccccccacatcctcccctacatcccagagatgccaccacttgtgtctccacaatgtgctcctgcccacccgggttccgcactgtccgacccctgcacaccactcatgtcaccacggcgtgcatcatgttcatccccatctatttatttaagcctttctttgcttgtagggcattttgtatgtagagcagttgaaaacagaacctcagaacttaacatctgtcctgatgttaaagtgcttttcatgaccaccctgttatctatgtatatgtaaagttaaggatgagatcttaagtttacaattaaaaactcagtactcaatatttaatattctactcgagctttatggaagccaaatcatgtgcatgtgtgtgtgtgcgtgtgtgcaagctttgaacctccttccacagccgcatcttctcatgacacaaagcttttgataagtactttcctgtgggtcgctcagcgcctcatagcatctcattcaattgcaagaatagaggccagacacggtggcgcatgcctgtagtcccagctaactgggaggctgaggcaggaggatcacttgagcccaggagattgaggctgcagtgagcatgatcgcgacactgcactccagcctgggtgacggtgagactttgtctcaaaaaaaaaaaaaaaaacaatggaaggcagacagcaagtccctgaggacacatcacacagtgtcctgtagctaagtgtctaggaaaaaacaaaaactccaaacccttcagtggatgaggacaaggtcgcagaaaggcattctgttgacagatgaacagccgaaagctggccagaccctcctgtatgcctctgcccttgtcctgtgggttgagggggtctgaccaggaggccacctacagcaggaagtgaggctgccatgtttccttgagacacagctgcctctccccagctctgtccctgtagtcacctgccggtgggcgaggatcctctccctgggataagcactcccagccccgtttatcagaaacacaggcaaggaaattggaactgccacccagcccagcatggtggctcaattggttggttgcgttgtcagttgtctcttcgttttgttaaggtttttaataagtacgtttggcataatgtcttttaatgggtttgtaatatttgtaacggttttagcagcctataacttttcagctggtgcttttacttagggaaaaaaacaatttgtaaatacagaacattgtttaaaagacataaccatagaacatagcttcctgtttgtggattttgtttcctatatattcaaagtaaaatgacttacaggagccacgtgctgtgtctttgttgtttcctctgtccgctttgtgagccatcccaaagacggctgccacccttgctgccatgcccacaggggccccctctgtggcggggtcttcagcatgaggatgcagtccccaaatcctgagccagatgacgtgaatggaagcctgagtccccatctcctccactgatcattttcctctggtctggcctcgcctagagaggaaggaaccccatgctccatcagcatatgaggccttcagcagcctgctcctggaatcctcccttcccagccctctcaggggcagactccctcatgcacccaggtgtcctggtccctgtgtttttttttgttgttgttgttgtttgagatggagtcttgcactgtcgcccaggctggagtgcagaggcgcgatctctgctcactgcaacctccacctcccaggttcaagcgatactcctgcctcagcctcccaagtagctgggattacaggtgcccgccaccaagcccagctaattttttgtatttttagtaggaacagcatttcactgtgttggccaggctggtcttgaactcctgacctcgtgatccacctgccttggcatcccaaagtgctgggattacaggcctgagccaccgcgcccagccggtccctgcattcttagaggggaccagcctccatacacctgggagtgaggggagttatttgcccagatttttttgtttggaggtgaaattaccataacaaatttaactttttttgcaggttgtgctggcttacgcctgtaatcccagtactttgggaggccgaggcaggaggatcccttgagcccaggagttcaagaacagcctgggctacatagtgagacctagtctctacaaaaaatgtataaaaattagccaggcaaccaggtgccgtggctcaagccagtaatcccagcactttgggaagccgaggtgggcggatcacttaaggccaagagttgagaccagcctggccaccatagtgaaaccctgtctctactaaaaatacaaaaattagccgggtgtggtggcgtgcacttgtagtcccagctactcaggaggctgaggcaggagattcacttgcaccagggagtggagggtttcagtgacccaagatcctgatactgtgctccagcctgggtgacagagtaagactctctctctcaaaaaataaataaatacaaatacaaaatataaaaattagccggtatggtggcgcacaactgtaatcccagctactcgggaggctgaagcaggagaatcgcttgaacccggaggcagagtttgcaatgaaccaagatcacaccactgcctgggcgagagagggagactctacctcgaaaaaaaaaaatagccaggcatggtggtgtgttcctgtagtcccagttacttaggaggctgaggcgggaggattacttgaacccaggaggatattagcagagacagagtcttgctctattttatatgtatataaaatagtattatctgtaaagtggactgctcagtggtattcagtacgttcacagtgttgcacagttatcatctctatctagttctgggacattttcattcccccaaaaggagattcattgccatcagcagtcactcctcattcctcctccctccccaagcccctggcaactagtaatctgcttcctgtctgtgaatttgcctgttctggatattttatatcaatggaatctcataccctgtgacctcttgtagcctgggatctctcagcactatgttttcaaggttcatctgcactgtagcatggatcattgctttgttccttttatgagtgaataatatcccattatatggatggaccaaactgttgatcttttttttttttttttgagacagggtcttgctctgtcacccaggctggagtgcagtgggttgatctcggctcactgcaacctttgcttcctagggtcaagcaattctcctgcctcagtctcctgagtagctgggactacaggcgcataccaccaagcccagataatttttggatttttagtagagatgaggtttcaccatattagccaggctggtctcagacccctgaccttgtgatccacctgcctcggcctctcaaagcgctgggattacaagcataagccactgcacccggcttttttttttttttcttgagacaggatcttgctctatagcccagtgcagtggtatgatctcagctcactgcaacctccacctcccaggctcaagggatcctcccacctcagccccccaaatagctggaatgacaggcaccaccatgccaggctaatttttctatattttctagacatggggtttcaccttgttgcccaggctggtcttgaactcctggactcaagtgatctgcccgccttggcctcccaaagtgctgggattaccaccgtgaaccacggtgcccggccttatccatccttttatggacattcgggttgcttcccccttgtggcgactgtgaatagtgctgctctgtgagttttggctggaccacgtgttttcaattctcctgggctttccctgtgtctttattgtggacagacagggccgctcagcacacacatatggtgtgaaggccctcatgtcactctcaggttagttccccatgagagatacacaagccatcttagcctcgagccccaaggggctctgctggatgtgcaacgtttttgtattttgttttgctatgtgtcgtttagagacagagtctcactctgttgcccgggcaggagtgcagtggtgcaatcacttgagcctcactgcagcctcaaacgccctggcccaagcgaccctcctgcctcatcctcctgtgtagctgggactatagatacgtgccaccacacccggttaattttttttttttttttgagatggagtcttgcactgttgcccgggctggagtgcagtggtgtgatctcggctcactgcaacctctgcctcccagattcaagagattctcctgcctcagcctcccgagtagctgggattacaggcacctgcctccattcccagctaatttttttgtattttttagtagacacagggtttcaccatgttggccaggctggtctccaactcctgagctcaagcaatcctcccaccttggactcccaaagtgctgggattacagtcgtgagacaccacaccggccctgtgcgagtgtttgagtctcaacatggtgatcacagcaccccaaccatcgatgcctgggctccttctgccccatccccaccagttcagcaccaggcagccttttcactcaaggtagactctgcttatccttcatcatcagcttggacatcatcttctccagacagacaggcaggggcccatctggcccatctcatacctctccagcccctgcatgggattcacatcttgaacctgagctggaccagagcacagcatgacgagcctgccatgggaccagccacctttccagcaggtgtgcagcccccagctgggaggtgtgaacctgcatgtggacagcaggtctatcctgggttgaccaatgtttcacacaaagcctacacccaggcagtcaccttggcctgggcgcccggcagactagggtcacacagctcctcctgttgagtcatttccgagtaggctatgccctgtgcagcatccatgggaccctgactcaggaagtgagtgaccttccttttcccacaagccatgtcctcatccatgtcatccctcatccacttagaggatgaggcgggagggaggttgaggcaggaggatcgcttgagcccaggaggttgaggctgcagcaagctatgatcgccccactgcactccagcctgggtgacagagtgagacccgctctctaaacaaaacatagtgaaacaaaaaacaaatgatagaagccagatgtggtggagcatacctgtagtcccagctccttaggaggctgagatgggatgatggttcaggtccaaaagtttgagactagcctgggcaacgtagcaagaccccgtctctataaaaaataaaacatctgcctgtaatcccagtactttgggaggccgaggcaggcgtatcacttgaggccaggagtttgagaccaacctgggcaacgtagcaagactttgtctctataaaaaatttaaaatcagctggacgtggtggctcatgtctgtaatcccaccatgttgggaggccgaggcaggtggatcacctgaggtcgcgagttcaagaccaatgtggccaacatagcgaaacacagtctctactaaaaatacaaaaatcagctgggtgtggtgctgcacgcctctaatcccagctacttggaggctgaggcagaagacagtgaccccaggaggcagaggtggcagtgagccaagatggcaccattgtactccagcctgggtgatggagtgagactccatctcaaaaaaaaaaaaaaattaaaatcagccaggcatggtgcctcacgcctgtaatcccagcactttgggaggccaaggcagggagatcatttgaggtcagcagttttttttgttttgttttgttttgtttttgttttgttttgttttgtttttgagatggagtctcgctctgtcgcccaggctggagtgcagtggcgcgatctcagctcactgcaagctctgcctcctgggttcacgccattctcctgcctcagcctccttagtagctgggactacaggcgcccgccaccgcgcccagctaattgtttgtatttttagtagagatggggtttcaccgtggtctccatctcctgacctcgtgatccgcccgcctcggcctcccaaagtgctgggattacaggcatgagccactgcgcccggccgaggtcaggagtttgagaccagcctgaccaacatagtgaaaccctgtctctactaaaatataaaaattagccagccgtggtagcgggtgcctgtaatctcagctactcgggaggctggggcaggagaatcgcttgaacccaggaggcagaagttgcagtgagccaagatcacgccactgcagtccagcctgggcaacagggcaagactccctctcaaaaataaataaacctggcagggcgaggtggctcacacctgtaatcccagcactttggggggccaaggcagatggatcacctaagctcaggagtttgagaccagcctggccaacatggtgaaatcccatctctactaaaaatacaaaaaaattagccgggcatggtggtgggcacctgtaaatcctagctactcaggagactgaggcatgagaatcgcttgaatccgggaggttggaggttgtggtgagctgagatcaggccactgccctccagcctggaccacagagtgagattccatctaaaaaaaagtaataataaaataaataaaaataaaaataaaataatgcaaaaattagccagccacggtggtgcacacctgtaatcccagatacgtgggaggctgaggcaggagaatcacttgaatccaggaggtggaggttgcagtaagccaagatcacgccactgcagtccagcctggttgacagagctagactccctctcgaaaaaacaaaaaaaacacttttttttttaaatttaaaattgccaggcggccgggcatggtggctcatgcctataatcccagcactttgggaggccgaggcaggtggatcacctgaggtcaggagttcgagaccagcctggccaacatggtgaaaccccgtctctactaaaaatacaaaaattagcagggcttggtggtgggtgcctgtaatcccagctactcaggaggcttgggcaggataatcacttgaatctgggtggcagagctgagatcgcgccgctgcactccagcctgggtgacagagcgagactccgtctcaaaaaacaaaaaaaaaaattgctaggcatagtggtgtgtgcctatagtcccagctactcaggagtctgaggtggaaggattgcttcagcctgggaggtcgaggctgcagtgagccacgattgcagctctgcaatccagtctgagcaacagagtgagaaccggtctctaaaaataataataaaaataaaaaagaaaatggacaactttcttttgaacacagcttctagaacccagcacctgaggaaatatacgcaggcagaaatcctcgcagtggccacctcacatcctgtctcctcctattccggctgctttgacaaattaccatagactgaggggcttacaaacaacaaatacttatttcttactgatctagaggctgggaaattcaaaatcaaggtgccagcagattcggagtctggcgagggcctgcttcctggtttgcttcccgctctctagctccaccctcatgacataatcatctcccagaggccccacctccaaaatacaatcacaggctgggtgcagtggctcacgactgtaatcccaaaactttgggaggccaagacaggagaatcacttgagctcaggagttcaagagcagcctgggcaacatggtgacaccctgtctgtacaaaaaatacaaaaaaattagccgggcatggtggtgcgcacccatagtcccatctactggggaagctgaggcagaggatcacttgagcccaggagttcaaggctggagtgagccatgatcccaccacggcattccagcctgagcgacagatcaagaccctgtctgaaaaataaataaaaaacagaggaccgagcgcaatggctcacgcctgtaatcccagcactttgggaggccaaggtgggcagatcatgacgtcaggagatggagaccatcctggctaacacggtgaaactccgtctctactaaaaatacaaaaaattagccggccctcgtggcggcagagcttgcagtgagccgagatcatgccactgcactccagcctgggtgacagagtgagactcagttaaaaaaaaaaaaaagaaaaaacaggccaggcgcggtggctcacacctgagctgagatcgtgctgttgcactccagcctgggtgacaacagcgagactccgtctcaaaaaaaaaaaaaaatacaatcacatttcaacataagaatattgaaagaggagggacacggtggctcatgcctgaatcccagcactttgggaagccaaggcgggaagactacttgaggtcaggagttcaagaccagcctagccaacatggtaaaactccatctctactaaaaatacaaaaattagccaggtgtggtgacaggagcctgtaatcccagcactttgggatgcctaggtgggcgaatcacctgaggtcaggagttccagatcagcctggtgaacatggtgaaacctcatctctactaaaaatacaaaaattagctgggtgtagtggcaggtgcttgtattcccagctactcgggaggctgaggcaggagaattgcttgaacctgggaagcggaggttgcagtgagccgagatctcaccattgcactccaacctgggtgacaagagggaaactccacctcaaaataaataaataaataaataaataagatgaagtttcttatttcgtcccaaatttatgctcacatggtgagattacaatgaaattggctgggaaaggaaaggaaaaggttaatttccacatgaattttattttcttagtactctgatttttttgattttttttatttttattttttttttttgagatggagtttcgctggttgcccaggctggaatgcaatggtgcaatctcagcttacagcaacctctgcttcccaggttcaagcgattctcctgcctcagcttcctgagtagctgggattacaggcgcacaccaccacgcccagctaattattttgtacttttagtggagatgtggtttcaccatgttggccaggctggtctggaactcctgacctcaggtgatccacccgcctcggcttcccaaagtgctgggattacaggtgtgagtcactatgcccggccagggatagtccactttgtcagtgtgtgtttgttgtgaacgtcgtctctaaccacagttccttacactcagtgtttctgcagcgcagggttcaggctccatctgcagttaggcacactctgtccagagtgagtctctgtgtggccttggcgctgtcctgctattccagggttctgagcacaaatcctcccctaaagggttaagcacaaactgttcagaagtcctgtcgtgaaccggaagtgtatctcccactctgtcttcatctgcaagtgtcctcagttgctactggcggcccctggcctgctctggccttggccaccagggggcatggtggcccaggagcagcaagggctgcccaggcaatgtccccaccaggtaggacaggtgggaacctacaatccagctagaaagactgggctggatgttgccagaccccagtctggccaggctttgctcatctgcagggatgtggggtgaccttcacaccactcctgtaactgttggagaagacaatggccagggttctccgggcgtcagggtgacaccattccctcctttacttgccaaacatgtattaagcacctactgtgcgctggatgctgggaacacagcagagaccacatcagacaatgtctgatgccctcagagggtggacatagttcccctgatgacgggtttcagaagggagggagtgttgaccatctgtgagaagggagtgtcgcacagtaggtgggggacaaccacaggggaggaggtgggggacgctgtgacaagaccaaaaggagggctgggagcgatggttcatgcctataattccagcactttgggaggccgaggtgggcagatcacctgatgtcaggagtttgagaccagcctgcccaacatggtgaaaccctgtctctacttaaaatacaaaaaattagccaggcatggtcgtgggcgcctgtaatcccagctactcaggaggctgaggcaggagaattgcttgaacctgggaggtggaagttgcagtgagccaaggtcacgccattgcacacagcctgggcaacaagagcaaaactccgtctcaaaaaaaaaaaaaaggaggcaagcaggccccccttgggccagctgatcagagctggacaacattccagcttcggcgatggggccaccaagacccaggcatctggggaattgtgtcccctactggcacagttgagtgactcgggtggggactgcaggctctggtcctggtcccctcctgtctggccacccctcaggggacactgggagggtatcgcggctaccaggctgcctgtcgcatttatggagggccagtccaccaccaccttgtactcagctgacatctggaagcacatccaggaggacactgaaggctcagaaagtgcctgggcccctgtgttcaggtgtgaaatcaaatctctgaggccccagaccagagccatcatccttctgcccccactggactgagactcacatgcccagaactgcacttgtggatgatggtggtacatccagggcagaatacacggcagacaggtcagctgatgacagtgtctgctggccagggtcagtccctgactctcttgtataatgtgtaacccaacagcgcgtgcccagggggctggggcactccagacaccggcccaggccctggcttgactcaggcctgaccctaaaggaacccgagtaagtgtctcagagccgggtcctggatccaaatgcccctaatacttcacacaccggccaccatgctgcttcctgagcaacctgctccccaggaaaagtgacctaatcactccaggctgttcttctccggagcatcctctggtacccaccgaaggaagtgacccctgagtcctactcagctcctccactcacgggatttttttttcttggcaactagttctccctatacccaaaacctatatgacaagaggatcctttttattaaaaaaatttttttgccaagtgcggcaaaaaatcccagcacaggccgggcacggtggctcacgcctataatcccagcactttaggaggccgaggcgggtggatcacgagctcagaaggtcgagaccatcctggctaacacggtgacaccccatctctactaaaaatacaaaaaattagccgggcgtggtggtgggcacctgtggtcccagctactcaggaggctgaggcaggagaatggtgtgaacccgggaggcggagcttgcagtgaggcaaggtcacgccactgcactccagcctgggcgacagagcgagactctgtctcagaaaaaaaaaaaaaaaatcccagcacttcgggagtctgtaatcccagcactttgggaggccaagagtttgagaccagcatagccaacatggtgaaaccccgtctctactaaaaatacaaaaattgggcacggtggctcacacctataatcccagcaattttcgaggccaaggcgggtggatcacctgaggtcaggagttccagaccagcctggacaacatggtgaaaccccatctctacaaaaaatacaaaaattagccgggcattggtggtttgtgcctgtagttccagctacttgggagactaaggctggagaatcacttaaacctgggaggtggaagttgcagcaagccaagattgcaccactgcactacagcctgggcgaagagtgagaatctgtctcaaaaaaaaaatttttttctctttggtcatgtgcggtagctcacgcctgtaatcccagcactttgggaggccaaggcaggtggatcacttgaggtcaggagttccagaccagcctggccaacatggtgaaactcccgtctctactaaaaatacaaaaatcagctggatgtggtggtgggcacctgtaatcccagctacttgggagactgaggcatgaaaatagtttgaacctgggaggcagagattgcagtgagctaggatcatgccactgcactccagcctgggagacagaaagaaattctgtcttaaaaaaaaaaaaaggggggggtggcaggcgcagtggcttacgcctgtaatcccagcactttgggaggctgagacaggcggatcacatgaggtcaggagttcgagaccagcctggccaacatggtgaaaaccctgtctctactaaaaacacaaaaaattagccaggcgtagtggtgggtgcctataattccagctactcaggaggttgacgcaggagaattgcttgaacccgggaggtggaggttgcggtgagccgagatcgcaccattgcactccagcctgggcaacaagagcaaaactctgtctcaaaaaaaaaaattttttttttttggccagcgtcaatggctcatacctgtaatcccatcactttgggaggccgaggcaggaggatcacttgagcccagaagtttcagaccagcctggcaacatgatgggaccctatctctacataaaatttaaaaattcaccaggtgcaattaggcctggtccccctcctctctggccactccaatctaaagtcaaattgaaaaaaaatgttggggctgggtacggtggctcacgtctataatcccagcactgtaggaggccgaggcgggtggatcacttgaggttaggagtttgagaccagcctggccaacatggcgaaatcccatctctactaaaaatgcaaaaattagccaggtgtggtggcgggtgcctgtagtaccaggtgctcaggaggctgaggcacgagaatctcttgaacctggaaggtggagattgcagtgagccaagattgtgccactgcactccagcctgggcaacagggcgagactctgtctcaaaataaataaataaatagataaataaataaataaaaataaaataatttttgtgtgtggagacagggtcttactctatttctcaggatgaagtgcagtggcatgatgtagccaggaactggagcttcaaactcccaggcccaagcaatcctccctcctcaacctcccaagtagcttggaccataggcaggtgccatcactcccagctaattttttaattaatttatttatttttgttgttgttgttgtttgtttgttttgagacggagtctcactgtcgcccaggctggagtgcagcagcgcaatctcagctcactgcaacctccacctcccaggttcaagtgattctcctgcctcagcctcctgagtagctgggactataggccctcaccgccgagcccggctaattttttttgtatttttagtagagacggggtttcaccatgtgggccaggatggtctagatagaactcttgacctcgtgatctacccgcctcagcctcccaaagtgctgggattacaggtgtgagccaccacgcccagccttattttaattttttattgagacagggtctcactatgttacccacgctggtcctgaactcctggcttcaagcaatcctgcctcagcctccaaaagtgctgggattccagccctgagccactgttcctcgctgaaggggattctttttcagggcattctttgtgacacactccttccctgggtgtgtcctggaatgtccgctggccacacccaggcctggtctggctgtggggacacccacatgcattgtcagccgggtacgagaccggggtgggctttgcacacagatcccacgactgtatacactcagccccgtgacaggaactgtagcccatggccacagcatctcttgctagaaactttttcaagaaacttacctcagtactcaaagccactgcggtcagcaagtgctgaacatgccccaatccctaacctcagaaaaggacactttctcttaactcctgtgtaaagggtcaggactggtgtctggctgccgaagaaactaaacatccagcttcgctttcccaggtaacatttgctgtatcatctgtgatgcaggagatggcaatggtattattattattattattattattatttttggaaatggagtctcgcgctgttatactgttgcccaggctggagtacacaggtgcgatctcggctcactgcaacctccgcctcccacgctcatgtgattctcctgcctcagcctcccaagtagctgggactacaggcacccagcaccacacctggctaatttttgtatttttggtagagacagggtttcaccatgttggccaggctggactcaaactcctgacttcaagtgatcctcctgccctggcctcccaaaacgctgggattataggcgtgagccactatgcctgtccggcaatggcattttgaccaatacaacatgggcatctaactagaattggggacacccacacgggtcataatttggggccaaagtagagttttttttgtttttgttttttttttggtagcgatgaggtctcactatgttgcccaggcagttctcaaactcctgggctcaagcgatcctcccacctcagcctctcaaaaggctgggattacaggcataagccaccgtgcccagcaacatttttaactctttttttttagagaaagggttttgctctgtcacccaggctggagtgcagtggcacaattgtagcctactgcagcctcggcttcctgggctcaagggatcctccagtctcagcctccagagtagttaggactgcaaatgcacaccaccacacttagacagtttttaattaattaattaattaattttgagacagagtctcactctgtcacccaggctggagtgtagtggtgtgatctctgctcattgcaactccccatcccagattcaagtgattctcctgcctcagcctccagagtatctgggattgcagacacatgccaccacgcctggctaatttttgtattaatatttttagtagaaatggagttttgccatgttggtcaggttggtcttaaactcctgtcctcaaatgatccatctaccttagcctcccaaagtgctgggattacaggggtaagccaccatgtccagccaatttttaaattattttttgtacagatggagtcttgctttgttgcccaggctggtctcaaactcctggcctcaagcgatcctcctgcctcagcctcccaaattgttggggggttacaggcatgagctactgtgcctgacctggaagtggattttgaagtggattttgcagcctgtttgtgtctcccaagccacaaaagactctgaccttcgtgtttgaccagttccttggaaggcaccagtctgtgtattaagtggattatccaaacccagactgactcctggcacatggaagatgctttgggatacacttatactaaaagggtattcattcgtgactgatctgaaatccaaatctaatggggcatcctatattttcacttgctaaatgtggccaccctagatgctcaatgacatccttgaataaaggaagctgatgaagttcaaacaaataattttaccagcggggtaaaaaaagctcaaagctcagtgcactttgcgaaacagtcatttcctcttccggtcagaataaactcctgactcctcccaggcccaagtgatcagccactccctcctaccagctggctgggctgctgtgctcagtcccaactcaggaaggacaagagtagctcctgtgaccataatgcctgtccacaagctgaggccccaccccactccgcctccttttctttttctttgaaatggagtcttggtctttttgcccaggctagagtgcagtggcgtgatctcggctcactgcaacctccacctcccaggctcaagcgattctcctgcctcagcctcccaaacagctgggattacaggcatgcaccaccacccccagctaatttttgtatttttagtagagacagggttttcaccatgttggtgaggctggtctcaaactcctgacctcatgatccacctgcctcggcctcccaaagtgctgggattacaggcgtgagccaccgtgcctggccacccccttgctttttagacacaaggtcttgctctgtcacccaggctggagtgcagtggcataatcttggctcactgcagccttaaaactcctcaagtgatcttctgtctcagcctcccaagtagttaggactatgggtgcgtgccaccaacgcgcctggcactgagacctggatttttttttttttttttttggtgagatagagtcttgctccgtcgcccaggctggagtgcagtggggtgatcttggctcactgcaacctccgccttccaggttcaagcgattctcctgcttcagcctcccaagtagctgggactacaggcgcccgccaccatgcccagctaatttgtgtatttttagtagagacagggtttcgctatgttggccaggccggtcttgaactcctgacctcgtaatctgcctgcctcggcctcccaaagtgctgggattacaggcgtgagccaccactcccggcctgagacctggatcttaaaaagggctcagctgggtgtagtcacacacctgtagttccagtgacttgggaggctgatataggaggctagcttgaagcccaggagttcaaagtgagactagcaacataatgagacctcatctcttttttttttttttttttttttttttgagacggagtcttactctgtcgcccaggctggagtgcagtagtgccatcttggctcactgcaagctccgcctcctgggttcatgcctttctcctgcctcagcctcccaagtagctgggactacaggcgccctccaccacgcccggctaattttttgtatttttagtagagacagggtttcaccatgttagccaggatggtctcaatctcctgatctcgtgatctgcccacctcgacctcccaaagtgctgggattacaggcgtgagccaccgtgcctggccgagacctcatctctttaaaaaataataataataaagttggctgagtgtggtggctcacgcttgtaatcccaacattttgggaagccgaggtgagaggattgcttgggcccaggagttcaagggcagcctggcgaacataataagactcccatctctacaaaaaaacttaaaaattagctaggcgtggtggcctgcacctgcagtcccaggtattcgggaggctgaggtgggaggatcgcttgagctggggaggttgaggctgcagtgagctgtgatcatgccactgcactccagcctcagcaacagagcaagaccctgtctctaaaatcagaaagaaaggaagaaaaggcaaaaagaggggaaaagaagccaagagaaaggcttgaaatgcatgtggatgaaagccctgacctgtattttaggctcagttacactcagatgtaactgtgtgtctgggatgcaaaagagctcagatcctacagaatctcaaggtgaattcttttccctgagtagcataaggcatctttttcccatctaacactgggttgggctcctcccttctgtatgcaaagtggccacaagtgcccaaaatgaactccctccagttcagaaatgcattccttcctggttagggaagtcactgttttgacttagaagtcttctatacttcaggcgtctagtgtctacctaataccttttgcctcagaaaagggtctaatcccacttaattacaagaagatttgctgttaggtttttgacctagagatctaaaaaggcctggctgaaagagttcctgagctccatctggacttaattccagattttctagccaaccaacactaataaagctatactctgctccccacctctgtataattcaggtgctacctgactttctctggtgaagcagcaggagtatttaggccaacctgttggtttggctgtgtctgtttctctctggaaatagacaatgactttttcttttttttttcttgtttttgagacagagtctcactctatcgcccaggctggagtgtaatggcacactcttggctcactgcaacctctgcctcccaggttcaagtgattctcctgcctcagcctcctgagtagctgggattacaggcgcctgccaccgctcctggctaatttttgttttatttatttatttatttatttatttatttatttatttactgagacggagtctcgctgtctcccaggctggatgcagtggctcaatcttggctcactgcaagttccaccttgccaggttcacgccattctcctgcctcagcctcccaagtagctgggactacaggcgcccgtaatttttgtatttttagtagagacagggtttcgccatgttggcaggctggtctagaaatcctgacctcaggtgatgcgcctgcttcggcctcccaaagtggagggattacaggcgtgagccactgctcccagagagtatctcattcttaacagttctttaactgttatcaaaatattggtctcaaagtactttaaggcaccgaaatgaggcacacataaacatatcatcaacacgctgaaatgtcatgaaaaaaattatactgagagacgtatataaaataagattttttttcttttctttttttttttttgagacagagtcttgctctgtagcccaggctggagtgcagtggcgcaatctcagctcactgcaagctccgcctctccggttcgcaccattctcctgcctcagcctctggagtagctgggactacaggcccccgccaccacgctctgctaactctttttttgtatttttagtagagatggggtttcaccgtgttagtcaggatggtctcgatctcctgacctcatgatccgcccgcctcagcctcccacagtgctgggattacaggcgtgagccaccgctcccgacccaagattatttttttaaactgaaaaaatgtatagtaattagccaataaaccagaatctgtaacattagatatatatatatatatatatatatatatatatatatttttttttttttttttttttttttttttcctgaggcggagttttgctctgttgccaggctgcagtgcagtggtgcgatctcggctcacggcaacctctgcctcctggtttcaagtgattctcctgcctcagcctcccaagtagctgggactacaggcacgcgccaagaccagctacttttttttttttttgagacgaagttttgcgttttgctcttgttgcccaggctaggagtgcaatggcgtgatctccgctcattgcaacctctgcctcccgggttcaagcgattctcctgcctcagcctcccgtgtagctgggattataggcaagtgccaccatgcccggctaattttatatatatttttttaatagagacagggtttctccatgttggtcaggctgatcttgaactcccgacctcaggtgataggcccacctcagcctcccaaagtgctgggattacaagcatgagccaccgtgcccggccaatttttgtatttttagtagagacagttttcactatgttggccaggatggtctcaatctcttgacctaatgatctgccggcctcagcctctcaaagtgctggggttacaggcgtaagccaccgcatcctgcctagacactgactttttcaacacattttccctggaagaaccaagaccaattctgatgggcttcccaaaggatgcaggttgtaatggattaacagttaacatatgtgaacctgaaagtgcttggcaaatccaaataaatatgttttcttttttggggtatggggggacagggtctcactctggccaggctggagtgtagtggcactatcatagctcactgcagcctcaaattcctggactcacgtgatctccctgcctcagcctcctgaatagctgagactacagacatgcaccaccacgcccagctaaattttttattttttgtggagacaaagtctcaccatgttgcccaggctggtctcgaactcccaggctcaagcaattttaaagtgctaggattacaggtgtgagtagctgcacccagccccaaatgaattatgcagtccaataatcttagggggtaatgatggagggcaccttgctttgtgcacctgaaccgccactgtcattgacaccagagtgctttagctcttctgcttattacccttcccactggtattaattagccatcattcctcattgccagtgggcactgcttcctttgtccaagggtacagcatcaacaggaggtctcacaggctagcaccagggaaccctcacttttctagctaccactgaggctccgcctcccttgtctcttgtggagtggcctggctccgttcccatttccctatttggatgtgaatgtcacttagccagtttgcccacatgatttcccagagccaggaagggaaacgccttggtgcagagatgcaatcacggctaccaccaaggaaaagaaggcacatccttggcgattctgtcacgtggtatctctttcttctttctttcttttttttttttgttgttgttgttcttgtaggttgtttggtctgtttggtttgtttttgagaaggagttttgctcttgtcgcccaggctggagtgcaatggtgcgatctcggctcactgcaacctccttctcccgggttctagtgattctcctgcctcaatctcctgagtagctgggattacaggtgcctgccaccacgcccagctaattttttgtttgttttgagacggagtctgggtctgtcgcccaagctggagtgcagtggcgccatctcggctcactgcaagctccgcctcctgggttcaccccattctcctgcctcagcctcctgagtagctgggactacaggcgcccgacaccacgcccggctaattttttgtagttttagtaaagacggggtttcactatgttagccaggatggtctcgatctcctgaccttgtgatccgcccgcctcggcctcccaaagtgctaggattataggcatgagccaccgcgcccggcagatgcctggctaatttttgtatttttagtggagatggggtttcatcatgttggccaggctggtcttgagctcctgacctcaggtgatccatctgcctcggcctctcaaagtgctgggattacaggcatgaggccctgcacccggccacttacagctgaatcctaaacttgtattgtctgaatctaaaattgggcccatgtgcaggaatggtgacatgaagggaggcgaggtctaagccctgttgagtccttgtgcaaagcggaaccatattaagaacctaaaacttaatatgttaatatgagtgcagtggctcacgcctgtaatcccagcactttggaaggccaaggcaggcggatcacgaggtcacgagttcaagactagcttggccaacattgggaaaccccgtctctactaaaaatacaaaaattaggttcatgcctgtaatcccagctactaaggaggctgaggcaagagaatcgttttaacctgggaagcagaggctgcagtgagccgagagcacatgattgcactccagcctgggtgatagtgagagactgcgactcaaaaaaacaaaaaggtcgggcgtggtggctcacacctgtaatcccagcactttgggaggctgaggcaggcagatcatgaggtcaggagttcaagaccagcctggccaacatgatgaaacctcatctctactaaaagtacaaaaaattatctgggtgtggtggcgagtgtctgtaatcacagctactcgggaggctgaggcagaagaatcgcttgaacctgggaggcagaggttgcagtgagctgagattgcgacattgtactccagcctgggcaacaagagcgaaactccgtctcaaaaaaaaaaataataataataattagccgggtgtggtggcatgtgcctgtagtcccagctgcttgagaggctgaggcacgagaatcgcctgaacctgggagacagagaatgcagtgagctgagacatgacactgcactccagcctgggcaacagaatgatattctgtttccaaaaaaaaaaaaaaaaaaacaaatcagaacatcagtctctaaggattgcactgagaattgtgagctcaaagtgtccacagtgcctggtacacagtagaacacagaaaatttcagtttcattccagtctctgggattctttctgagagcaggaatttaaccttattcatttaagtaatccctcagtgctctgcacatgactttactttatagttgttgaattgaaccaggatcaaagagcagctcattgtccagcctcttcacttcatacatgagaaactgagcagcacagagggcaactgtaactcatccacatcccacttgtttgtttttttgtttgtttgtttgtttgtttttgatacggagtctctctctgttgcccaggctggagtgcaggggtgcgatcttggctcactgcaacctctgcctcccaggttcaagcgattctcctgcctcagcctccggagtagctgggactacaggcatgtgccaggacgcctggctaattttttgtatttttagtagagatggggtttcaccatgttaaccaggacggtctcaatctcctaacctcatgatccgcctgcctcgggctcccaaagttctgagattacaggcgtgagccaccacatccggccatcccacttgtattttatggctggatctttttttttcctgagatggagtttcactcttgttgcccacgctggagtgcaatggcgcgatctcggctcactaaaacctccagggtagctgggattcccagcttcccgagtaggtgggattacaggcacatgccaccacgtttggctaattttgtatttttagcagagacagggtttctccatgttagtcaacctggtcttgaattcccaacctcaggtgatccgcccgcctcggcttcctaaagtgttggaattacaggcatgagccaccatgcccagcctttcttttttttcctgagacatagtcttgctctgtcgcccagagctgaagtgcaatgatacgatattggctcactgcaacctccacctcccgggttcaagcaattctcctgcctcagcctcctgagtagctgggattttaggtacctgcaccatccccgtctaatttttgtatttttagtagagacggggtttcaccttgttggtcaggctggtctcaaactcctgacctcaggtgatctacccacctcggcctcccaaagtgtcaggattaccggtatgagccaccgtgcctggccactaattttattttatttttttgtagagagggggtcccggtatgttgcccaggtgagtctcaaattcctgggctcaattctcccaccctggcctcccaaagtggtacaattgcaggtatgagccctgatttcttatatggtaaagacagtaactggcctctctagggactggcaggtgtgggttcgaccccagctctgccaaccaccaaagtccaagtgtttattgtccacctggactgcctcagacacttgcaggatgtggtaagtactatgacacaggtgcacagaaggtgctctgggaacagcttgtcttcatgtttacaatggcttctttccctagccaaggactctatcagccttgccacttggggacaggttgagctcgctcagggagtcaggccccacagggctccctgccaacctcccatcattgtgattgaatttattctttatttttcttccaggaacatcagcgcacttgtaacaataataatcatcttttctactgggtatactgtttcatggtttacaaagcactttcacatccattatctcatttaatcacttcctcctctacattcctacaacagtttcttggtacctcttcagtataatattctgcctggtataacaagcctatttccctttactgcatttatttttactcacaagttccagcatataattcaggcatctttgcaccttggacacttctgtgtacaaagtaagcacaataaaagtttgacatgccagtcacagcagccttcgaccacagtaccagctacttgggaggttgaggcaggaggattgcttgagctcaggagtttgagtccagcctgggcaacatagcaagaccctgtctcttcgaaaaagtttgccggctgggcctgctggctcacgcctgcaatccgagcactttgggaggtcgaggtgggcggatcacttgaggtcagaagttcaagaccagcctggccaatatggtgaaaccccatctctactaaaaatacaaaaaaattagccgggcattgtggtgtgtgcctgtaatcccagctactcaggaggctgaggcaggagaattgcttgaacctgggaggcggaggttgcagtgagccgagatcgtgccactgcactccagcctgggcaacagagaaagactccatctcaaataaaaaaaaaaagaagtttgccatattgaatcatcagtgttgcaggtctttctcattcattactgccatcttcactcctttcattcaatgggattgcctactaaggacaaagctgggttctttggaggggaaatgaggcaagaagttcagaatcaagtgaagggggaagacacaagtgaaggccctgatccctggtaggccacagtacatgcttcatgctttagcagcggtgcaaacacagttggggctgggcacggtgactcacacctgtaattctagcgcattggaaggtaattcggccacactgggaggctgaggcgggagaattgcttgatgccaggagtttgagaccagcccaggcaacagaaggagaccttctgttttaaattttttttttttaatgtaaaaacttaggttgccaggcgcggcggctcacacctgtaatcctagcactttgggaagctgaggggggcagatcacgaggtcaggagtctgagaccagcctggccaacatggtggaaccccatctctactaaaaatacaaaaattacccaggcgtggtggcacgcgcctgtaatcccagctactcaggaggctgaagcaggagaatcgcttgaatctgggaggcggaggttgcagtgagccaagatcacccccctgcactccagcctgggcgacagagcaagactccatctcacaagacaaaacaaaacaaaacaaacaaaaaaacccctaggtcttgtggcatgcactagcggtaccagctactcaggggctgagtcaggaggatcacctaagcccaaggaatggaggttccatcatgatcttgccactgtactccagcctgggtgacagagcaaaatcctgtctcaaagaaccaacaaacaaaaagaaaaaaaaatactcttgcttcccagagtttggggtgactttttttttttaagacagggtctcactgtgtcacctaggctggagtgcagtggtgcgatcatggctcactgcagccttgacctcccaggctcaggtgattcttcaagagtttggggtgactgattttatctgggggtgactgtgaagcaggaatgcttcttggaaggatcttactcagcagagaaggaaactgcagggctgaagaggcaaacgggacacatttgggaagggccacaaatgtgtcccttgggaaaaagtggacagctgcatggaaaaattctcctcaaaaagaataggaggctgggcgcggtggctcacacctgtaattctagcactttgagaggccgaggcgggtggatcacttgaggtcaggagttcaagaccagcctggccaacatggtgaaaccctgtctctactaaaaatacaaaaattagcttggtgtggtggcgcatgcctgtaatccgagctgctctggaggctgaggcaggagaatggcttgaacctgggaggcggagatggcaagatagtgccactgcacaacagagtgagactgtgtcaaaaaaaaaaaaaaaaaaagggaaagggggcaaaatgggctgcttttctttcgttttcttttttttttgagagggagtctccctctgtcgcccaggctggagtgcagtggcgccatctccgctcactgcaagctccgcctcccgagttcacgccattctcctgcctcagcctcctgagtagcttggactacaggcgcccgccaccacacctggctaattttttgtatttttagtagagacggggtttcactgtgttagccaggatggtctcgatcttttggcctcgtgatccgcccgcctcagcctcccaaaatgctgggattacaggcgtgaaccaccgcgcccggcctgggttgcttttctaaaaaggtctaactcaccgcattgtcctagggctgaggcgtcagaaagtcgaagtttcaggaaaaggggaccccttcctcccacactcagatgctgcttagaaaagcacatggagcacaactccctcgcatttttctttttctttctttctttttgagacggagtctcactgtcatccaggctggagtgcagtggtggatctcggcgcactgcaacctgcctcccaggttcaagcggttctcctgcctcagcctcccgagtagctgggactataggcgcccactaccacgcccggctaatttttgtatttttagtaaagacagggtttcaccatcttggccagactggtctcgaactcctgacctcaggtgatccgcccacctcggcttcccaaagtgctgggatacaagcgtgagccaccgcgcccgataactttcttttttcttttttttgagacagggtctcgctctgtcgcccaggctggagtgcagtggcacgatcttggctcactgcagcctcgacctctcggttcaaacgatcctcccacctcagcctccggagtagctgggactacaggtgtgcgccaccacccctgctgattttttcattttgattttaatttttgtagagacaggattttgccatgttgcccaggctggtctgaaactcctgggctcaatcgaccctccagtctcaaccttccaaagtgctgggattccaggcgtgagccaccgcgcccggtcgcatttccttagtaaaggggtgaggggcgcccatctcctgccatccttctctggagagaggcgaggtgcttgaagtcccaaattcctcgtgtagtgagaaaacaggggaggcagaaaatccccaagatatcttcagaaacgaaggtggaggggggcgcgcagccctcactttcctcagataaaggagggacagggagagcggcccccaagagtgcttagaaaaggagtgtatgtgccccaaatattcctcggaaaaggcggtggaccctggattctccaaatgctccttagggatcccgaactcccatgttttcttaggaaacagagctggggtcccgaatctacaacataatcgtgatcccggcaattgtcctcagaaaaccgggcagggcaagaaacccccaaactctctcagaagaggggtcggggcaagatttccgaagatcctcctcagaacgggggccagggaaaagaatcccgaagcagagtcttctcagaaccggggcgcgcgccagaatctccaagattctcctggatagagagggtcgaagccacaagacgaggcagaaagagcgcgcggccaccggagccccttagaaacactgccaggccacgaagcgcccgggctcctcagaggcgccgctcgcagcccgtcgtagctgccccacgcccgcctggccaaggccgcctccggtgcattatgggtggggagcccctgcagagcactgcggggaaccccctgcccagccagttgccggccgccgggtggcccaggcgatccgccctccggggtcccagggagccggccacgaattgactcgtccccctaggccccgcccctcgcggggttcccgccccgaagtttaagtcccgcccccgcatggccttgagtggctctgcggcccgctcccatctaccattggcaggatgcctgtcagtcattccgtcccgcctcctcggacccgccccggccggcggcgcgatcccgagaaccagccggcccgcgcactcactggtcgtcatgcgctgtctgtcatgaagctggccacaccttccatggggtgcgggtcctgggagtcctggctggacctcattggcttgtggcgccttcactcggagagacgcgcctcaacccggaagtgtgcgaggcgaaatctgcctagcaaccggggaagccgggctgtgaagcgggcaatttcagtgtgagactgagccgcgagactgagctgcggctccgagcgctgcgcggcggctcctcccgcccagggtcagcgccccggcgcgcgcacgcgcacccccgccgcccgagcgcgccccgcgccgcccgcgcagtcggtcggtcggtcgtctgtcctgtcgccgctgccgccgccgccacagcggccgccgcgggcgccacctgagggagtcgcctccgcgggacgccacaagacctgaccggactgcgccgcccgaggccgtcggccgccgtcagcgagggcgccgagcaacttcggtgagtaaggggcaggcgccgctggcgggtccccggtttccggtgccccaggctctctggggcttccgcttctcccgcactaccttggccgagtttactcccttctccacagcacttccccctcaggggagcccctgctctgggcccccccgcctctccaggggacccccgcctctctaggagaccccgtctctcttagggaccctcgcctctcttggggacacacccgcctctctaggggcctccctcctctccaggagacccttgcctctctaggggaccccgtctctcttggggaccccgtctctccaggcaggggatcccatctttctagcgacccccacctttctaggggactttcttcccatctaggggacccttgcctctctaggggactcccatctctccaggcaggggaccccgcttctctaggggaacgctgcctctctagaggatccgtgcctttctagaggatccccacctctctaggggaccccgtctctctaggggacctcgtctctagggaacccccgtctctccgaggggagccctgtctctctaggcgaccctgcttctctgaggggacaacccctcttatcaggggctcccccgcctctctgaggacccctgccggagggaacccccacctctctgaggaatcctgcctttgacaggaactaactcccttctttggggatccccaactctttgagaattcccgcttatctgaggggactcccttcttcactgagggtccctctacttttctcaggaacccatccttttgagggacccctgcctccctagagaccccttcctatctgaggacccccgcctctgaggggagtccctttctctgagggacccctgcctctttgaggggaatccccatctctctgagagaccctctgcctctctgagggtcccccgctttctttgaggggccctggcctctctaagaccctatcctcactcctctaaggagagacccctgattctatcagggtgtactttctctgagggatcccccaccttttgtggacccctggggaaccccttcttccccgggggacccctcttttcagaagacattgctgcttctcggaggaagccttgcctctctgtggggatctccccacccccacctctctcagctgtggtcctacttttctgacttgtccccctttctttttttttttgagacagagtctcattccgtctcccaggctggagtgcagtggtgcgatctgggctcactgtaacctctgcctcctgggttcaagcgactcttctgcctcagcttcctgagtagctgggactacaggcacccaccaccatgcctggctaatttttgtatttttgtagagagggggtttcatcatgttggccaggctggtctcgaacttctgagctcaggtgatccacccgcctcggcctcccacagtgttgggattacaggtgtgagccaccgtgcctggcccccgctttttgatgagtgccttcactttcctgagggggtcccccacttctttgaaatgcccatctgactggatcgttagttttctgaggtatacccctactttaccagtatccttcttttctatttcttctgggcccccaaatgctctatggatcctgcagttttctgaggggtccccagtttctccagaggttttccccttaacttgagatatcccactcctgtaggctcctcacatctctgaagtgtgtctccccttttccaagatatcccgtctcccgatgggagacactgtggatcttcttcacttccctgaggggtccctctgaattccgtggggttgcctcccacttgccctctttctagaggctttcctcttgattttctaagggagaaactctttatttatccttggagcactcacatcaagcttctcctccttttttttttttttggagatggagtttcgctcttgttgcctaggctggagtgcaatggtgtgatctctggctcaccgcaacctccgcctcctgggttcaagcaattctcctgcctcagcctcctgagcagctgggattacaggcatgtgccaccacacctggctaattttgtatttttagtagagatggggtttctccatgtgggtcagggtggtctcgaactcccaacctcaggtgatccgccggcctcggcctcccaaagtgctgggattacaggcgtgaaccaccgcgcccggccaagcttctcctctttctgtctgtggcacccactttcccccaactgtggaggaagagagcagaaatgtacccctccttcagtctttgttgccactctaggggtattctctggacttttatttcggtttccaggagcctggaggattttgtggctggaggggaaagtcaaaaagcatgatttcctcatgtccctctaagacctgctagatttgggggagcaggagctgctactagatgaccaccttagttactccattttccagccgtgaggccatcacagtgttgtcaggcctttgtgaagacaaaagggacaagggagaaacattgtatccccattatcacactgtcaagctgtgggagtgacccacttcctgtcccatccctcagtcctccccctgcatagtataacttaaccttccctccccgtgctgaaaaaaaatcaaaataaaaaggaaaagaaaactctccttcatctcttcctgttgcattttctctcccgagaccccctgattcaatccttgatcaaataggatccctagttcgtaggccagtttggtttgaaagacagagcaagaagcaggaaatggatcaccttagatccagaaacaggggaagggaggcaagggacaggatttgacgacatttctgtaagttttaggtgactttggcctggcccaaaaggaactttttacgtggcgtttacaaatctcatatgtactttttttaatggcccaccctggattccaagttcactccagtagctaattttatctgctttgccaaatgcagagctctgtggagcccaagtagatgaatgctggcattgagagatggtccaaaggacaggaatgaactcagtttgaaacctgagtaacttgtaaccacttcgtgtccacgcacaagtctcaagctaaaaatgtggggagagtttgactgaagtagagttctgaagtataggctgcgctagtgtttggtttagcatttcaacaagttcttccctctgactccattggaactgcagttcactttacagtttgactgagggcagtctctctcctgttcatttccatctgggtcttgcttaatttgagtcctttgtgaagactcctgccgaggctataatttgagttctaaatctgtcggtggaccatgtggacacaagtttcaactcgagctattttcttctggggagaagtgcttggagactttcctgggccctctgctgctgggctaagtcaagtccaggcaggaggctgctgcagacttggttgctcttctcctgcctcttcctggtcagctgtaggcactgccctcaggggaagggaaagttggaggggagtttgggactgagatgagggtagagaagtgcctgaggtgagggtagagaagtgcctgcacgtatttactattttattttatttttttgagacagggtctcactttgtcactcaggcgggagtgcagtggtgcgatctcggctcactgcaacctctgccctactggctcacgtgatcctcccacctcagcctctgaagtagctgggaccacaggcgcatgccaccacgcccggctatatttttgtatttttggtagagacgaggtctcaccatgttgcccaggctagtctcaaactcctgagctcaagtgatctgcccgcctcagcctcccaaggtgttgggattacaggcgtgagccactgtgaccgacctattattttaaataaaacctataggaccagcagatgggatgttaaaaagggaatggacaactttgaagtcagaaggagccagttcagattctggtgctgcccttcttagttatgtggccttggacaagtgatggcacaaaattggcatgttattaaatattcgagggaacacattgctgtgaatgtgtgtgtcaagttgcttactgatgatgggaggtgcttactagatggatgaatgaatgaatccgagatgatgaactggaggtggacagcacagctcctggcacacagttggtgtgcagtaaaggctgcttgttgtattcctggcctggactcacagaccaggaagcgcttgatattctgccaaggctaaaaatgcccaaagagaaagaaacttggtatgtctcttggaaaacccactcccctactgcgtctcttagcaagagttttctgtgttctgataccagatgtgagatgggtttactgtatggcagggcatttgtgtttctcttggccttggtgtctccccctgtaaaatggggtaatttgtgaattaagggcaagtagggagatgtattactctaattagaccacaggcaagatagaagattataatggacttgaagaattgtgggaagaagaaaatagatgaactatgtacgcctaagggatcacatgcgtattatgagactgcttgagtgagtgagtccagcagttacctggtgagtgatctgttcttacactttagaaccttgaaagaagagccattctttcattgtaatagatcagatttggggacaaaagactgggaaagtgatgtacaaagccatttgacgccacacaataatagtactttgagagggccagtgtgtggcttagtgcccacgaggagatcagaatgcacctcaagctcccaaggcccagagggctgtggagatgctaactcagcttagaggctggggcaggggtcggggggcagtggaatagaggggagtggacaggacattttacaaaatttttttcttgagaggatttttttcttaacaattagtaaaagccatagaatcatggctggtgaattaggcccagccttcttcacttactagtatgggaatagatggcattctgcccctgacggctaaaacccaggaggaaataatgggtgaaaatctgaactaggcccctggtgggctgctcctatgtttgaagaaagggttgtgggtttttttgtttgttttcttcctggaaatataccctctctcttcctccttccctcctttctttctctctttcatgcacacatatatagacacacactgactttggtattgaagcaaagaaatatgcaccaatcttaaatttctttcaattcttttaaggacagttattccattacatgggaaaggagcaaaatttattatatttaaaatataagaactaaggtaaacaactttaaagggatcactctcccctttaaaattatgctatgtctcttgtgtaccacagacttcactttggtggatggtggggccaccaccaagtctctatctaacaggaagttttttaaacttgtttttttttacttgaaggatccttacagcaataaaaaaccttggatagttagaaatgatattgatctaggtacatttattagatgtaatgtaatgtggttatctgttggtgggcaggtctaaaaggcatgtgggtccaaacactgcccagcttctaactctggacgataaaaactgttgatttatggaactgaaatagctagggaagtcagggtttccttcctgttggagacagcactgggggcattaaatccctgtgggatcttgatgataagaaataagctgacctcttttggaattgggaaataactactgtgtcaagtggttccatccaaatgaatggatggtgttatttttgatttctagttttaagtttgacttcatcctctcagaaacttgactgcctttgtttatactggtgtgtcttttgaataagagtttttcctttttttttttttttttttttttgagacagagtcttgtgctctgtcacccaggctggagtgcagtggtgcaatcacagttcactgcagcctcgacttccgggctcaagtgatcctcccacctcagcctcttgagtagctgggactacaggcatgcgccaccatgcccggctaattttgtatttttgtagagacagggtctcgctatgtttcccaggctggtcttgaactcctgagttcaagtgattctctcactttggcctcccaaagtgttgggattataggtgtgtgcctggcccaagtttattgtgtgtgtgtttttttttttttttccagacagagtctcgctctgtcacctaggctggagtgcagtggtgcgatcttggctcactgcaacctccacctcctgggttcaagcaattctctgtcttagccacccgagtagctgggattacaggcacccaccaccatgcctggctaatttttgtatttttagtagagacggggtttcaccatcttggccaagctggtctcgaatccctgacctcgtgatccacctgcctcagcctcccaaagtgctgggattagaggcgtgagccactgcgtccggtcaagtttttttttttttttttgaaacagagcagagtcttgctctgtcacccagcctggagtgtagtggcacaatcttggctcactgcaacctctgcctcctgggttcaagccattcttctgcctcagcctccccagtagctaggattacaagtgtgcaccactgcgctcagctgatttttgtatttttagtagagacagggtttcaccatgttggccaggctggtcttgaactcctgaccttatgaactgcctgcctcggactgccaaagtgttgggattacaggcgtgagccaccgtgcctggccagtttattcttttaaattggcttataaggggccaggtgcggtggcttacgcctgtaaccctagcactttgggaggctgaggcaggggatcacttgagatcaggagtttgagaccagcctggccaaaatggcaaaaccctgtctactaaaaatccaaaaattagctgggcgtggtggcacatgcctgtaatcccagctactcgggaggctgaggcacaagaatggcttgaacctgagtgagaggcagagtttgcagtgagctgaggtcgggccactgcactccagcctgagtgacagagtgagattccgtgtaaaaaaaaaaaaattataagggacaagtgaacacttaagagctttacttgtgtggccataagatatggtgtatgtgtgttttctagtgcaatttacattacattaaaaattagaaagtgttaaatcttctggcccatgtaacttcctatgcgaacaaataattcaggaacaaacactttcatgcctaagataaaacattttcatgcttggtgatgggggtctggcagtgagcaggactgacacagctggccttccagaagcttacatcttagttgcagacaaataaacaagcaaatgaatgaaagaacattgtgaggtttcttgagaatatccctaagtgctgcagctaccctcattgggagcttcaggtggggtttcttggaggtgtagaagtgaaacctcactacctctttaatttcctcactgggctcctgtttcctgtctctaaaaggagacagaaattatggcattttcctacttgattgttggcgatagttgattcatgaccactgtggctgtaatcttggagaaacgagagaaactagaatggtcacggcagggagcattttcaggtttgcctttgtttctttttttttttttggagacagtcttgctctgtcgcccaggctggagtgcagtggcgtgatcttggctcactgcaacctccacctcctgggttcaagtgattctcctacctcagcctcccgagtagctgggattacaggcacctgccaccacggctggctaattttttgtgttttagtagagatgggggtttcaccatgttgcccagggtggtctcgaactcctgagctcaagcaatcctcccgcctaggcctcccaaagtgctgggattacaggtgtgagccaccatgcctggccaagtttgcctttcttgaagtcagtggagacgtgtttttggaatcctgtggcatttcttcatggcaatgcatattacactaagtgataaaccgctctaaaagcccttcccttgttgaaatcttaaaaacattcagacaagctggggctgcctgggtgttggtggtggtttaggaataatgagatttccaatagatgactgctttgttatgtattggtagactcttggtgcatggatttccctctgcccgggctttcctcttttttttttttttttttgagatggagtctcgctgtgttgcccaggttggagtgcagtagtgtgatcttggcccactgcaacctctgcctcccaggttcaagcgattctcctgtctcagcctcctgagtagctgggattacaggcggcatgctgccatgcctggctaattttttgtattttagtagagacggggtttcactgtgttgcccaggctggtcttgaactgagctcagaaaattcacccacctcggtctcccaaagtgctgggattacaggcgtgagccaccactcccggcccaggctttcctcttacactgggactgggaaggtgctgtttagacttttttatgttgggcaaggctggaagtcttagatttgacaggtgcttttcttaagtaagtgtatctgtgagaggtggggctggagagcaaggcgggatattcattttgggcacagcctcgagggcaagagggagggtgttagaaggagagtttctggttgtctttttttttcccttccacccaagttctgactctggaggtggagaggcaggcccaggccggaagtgggcgtggacaagtaatgcaactgtgcatgtgaccaggctcccacctctgggctctgctgcccttgggaagtggatgcttgctccctcctgacttcctgttctccctccttacaggctgagttcttgggctccaagttgagcacagaaaatacgttcaaggccgggcgcggtggctcacgcctgtaatcccagcactttgggaggctgaggcaggcggatcatttgagcccaggagtttgagacctgcctggccaacatggcgaaaccccgtccctactaaaaatgtaaaaactagctaggtgtggtggtgcacgcctgtaatcccaggtactctggaggctgaggcaggagaatcacttgaacccaggaggcggggtttgcaatgagctgagatcatgccactgcactccagcctgggcaacagagcgagattccgtctcaaaaaaaaaaaatagaaaacatgttcaagttaccccttttccttggtaagccgctttgtcagagctggaagccaccagtggacctgtacttgccagttttggggtctcaactaatacacccacaaactcagaggcctatctggcagggcggccaaaaagatggtttcttgttatattatcacagtgttcccctcgggagcttgtctgcaccaagagctgcctggaggtgtgtatggaacttaaagaatccgacagtagataggtccttcaggaagagtgtgttcttgaagaatcgtttgcagttacttacagctttttgctttataaaagtacggtgggagtccctgtgccatagaaactttagagccaaaaaactttgggcttgatcctgattctaccacttgctggcatgtgaccttagaaaaatagcctaacttcaagtggcctactctttctgagcctcagtttcctcaaaattaaactcaaatcctcgtttgtgggctggtttgtttgtaagcatacagcaagcggccagactgttgtagatgcctagtaaaggtagttgttaaagaatcatatttaggagccgggcacggtggctcacacctgtaaacccagcactttgggaggctgaggcgggtggatcgcctgaggtcaggagtttgagaccagcctggccaacatagtgaaaccctgtctgtactgaaaatacgaattagctgggtggtgggcgcctctaatcccagttactagggaggttgaggtaggagaatcgcttgaacctggaaggcggaggttgcagtgagctgagatcatgccactgcactccagcctgggcaacaaaagtgaaactccgtctgaaaaaaaaatcatatttaggctgaccgtttctcttgaggttggcacctgaggttggacaacaatctgtggatgttaatactgcccaagaacaaaccagttgacactgggccaataggctgagcatgtctgaaggccagtgatctggaagttcctagtttggttgatttttcccagttgagatcccttagttcattgtagctttaacccctacagcctcaccttactgtactctccatatggacttgaagtgcctcaggaaacatgatggggtaattgggaaaaaggctcaaaccttgagctcaggtgatctgcctgccttggcctcttaaagtgctgggatttcaggcatgagccactgtgcgcgacctgtttgttaggtttctttttcttttctttctttctttcttttttttgagacagtctcgctatgttgcccaggctggagtgcaatggtgcagtctcagctcattgcaacctccacctcctgggttcaagccattcttctgcgtcagcctcccgagtagctgggattacaggcgcctgccaccatgcagggctaatttttgtattttcggtagagatgaggtttcaccatgttggccaggctggtctcaaactcctgacctcgtaatctgcccaactcagcatcccaaagtgtgggattacaggcgtgagccactgctcccagccgttaggtttcttaagtggctaggtgttctgagaagaggcatagcatgggcacaggcagagacctggagttgaaaacagccaagtgagttcccttgacctgaggaggttatgctcttctaaaagtcagagtttgagctgatcacattggcaagaaaagtccaaaattgcttccaaaggtagaaagttaaaatgtgctatagtaggatccaagattaaactcaaaatagtatttaaattgagcttttattttttttgagacggagtttcgctcttgttgcccaggctggagtgcaatggcgtgatctcagcttaccgcaacctccgcctcctgggttcaagcgattctcctgcctcagcaggagaatgagtaatgtgtaatgaggctaattatatatttttagtagagatggggtttctccatgatggtcaggctggtctcgaactcccgacctcaggcgatctgcctgccttagcctaccaaagtgttgggattacaggcatgagcctccgtaccgggccttaaattgagctttcaataaacattttcaatcaggaagcaatgatggccagtgaaatcagccatctagactctgtaatggtatactgtatatgtagactttaacctccaaaggagcttcaagagaacagacttcagggctgcttctgacctttttcctttgagaattgttatcatttaagctggtctaaaattcttaatacatcagaacagttttttgttttttttgagacagagtcgcactccgttgcccaggctggagtacactggcattactgcagctttgaactcttaggcccaagccatccccttgcctcagcacccagataactaggactacaggcgcatgctatcatgccaggctaattttatttagttagttagttagttaattagttgagacagagttttgctcttgttgcccatgctggagtgcagtggcgtgatctcggctcaccacaaccttcgccttctgggttcaagcaattttcctgcctcagcttcctgagtagctgggattacaggcatgcgccaccaggctcggctaattttgtatttttagtagagatggggtttctccatgttggtcaggctggtctcgaactcctgacctcaggtgatctggctgctgcagcctcccaaagtgcagggattacaggcgtgacccactgctaaccgccttatttatttatttatttgagatggagtctcgctcttgttgcccaggctggagtgcagtggtgtgatctcgggtcaccgcaacctccgcctcccgggttcaagcaattctcctgcctcagcctcccgagtagctgagattacaggcatgcactaccacgcccagctaatttttgcatttttagtagagacggggtttcatgttggccaggctggtttccaactcctgacctcaggcgatccgcttgcctcggcctcccaaagtgctgggattacaggcgtgagccaccatgcccggccagctaattttattttttaacttttgtctcactgtgttgcccaggctggtctcaaacttctgggctcaaggacttctcccaccttggcctcccaaagtgctgggattacaggcatgagacactgtgcccggcctagaacaatttaaacttactttcggctgggtgtggtggctcacgcctgtaatcccaacattttgggaggctgaggtgggtggatcacctgaggtcaggagttcaccaacatggtgaaaccccgtctctactaaaatacaaaaattaggccaggcgtggtggctcacgcctgtaatcccagcactttgggaggccaaggcgggtggataaccaggtcaggagtttaagaccagcctggccaacatggtgaaaccctgtctctactaaaactacaaaaattagctgggcacagtggcgggcgcctgtaatcccagctacttgggaggctgaggcaggagaatcgcttgaacccgggcagcaggggttgcggtgagctgagatcacgccactgccctccagcctgggcgacagagtgagactccgtctcaaaaaaaaagcaaaaaattgccaggcatggtggcccacgcctgtaatctcagctacttgggaggctcaagcatgagaattgcttgaacctgagaggtggaggttgcagtgagccgagatcatgccaccacactccagcctggatgacagagccaggctccatctcaaacaaacaaacaaaaacctacttttttttttttttgagacagggtctcattctgttgcccacgctggagcgcagtggcagtagtgacacagctcactacagccttgacctcccaggctcaagcctgctaatttttgtattcttttttgtagggacggggttttgccatgttgcccaggctggtctggaactcctgggctcaagtgatctgcccgcctgggtctcccaaagtgctgagcttacaggtgtgagccacctcgcccagccaatttttaaactttcactgcattttcaaactttagcctttatatttaacctctcaaattgtctctattgaaggttacctttttgacctaaatttgaaataaatatcttagtcttcccaaaacaggagttagttagatatagacctgattacgtgggcatgtgagagggcatggttgttattatcaagctgtgaaagagagaacaaactagaagggcactccacctgtgttttttaaataaattacgggcatttcactataaatggggggtttggggagtatacatcctgttaggaaaacatttgggaggaatgttttcctaagttggcagatctgccatttaacaaatggggagtagggtgtgaaatagatgccaagttttaaaaatacgtttttctgcatgtccaactaaggatatttattagaccgatcatgtgactaacactccttccctgcttggggggtttgaataggctgatttccagactcgaggctgtcatatagcctttttgtttttcctggtagttttctgattttttttttttaatctttaattcatagaaaacagtttacttccatccaaattaggtgggaatttttttaaaccatatgtagacacaaaagagatattccttgccaactagtgacacatggcagatgaagacagagtgggagatacacttccggttcacaacagcacttctgagcagtttgtgcttaaccctttaggggagcatttgtgctcagaaccctggaatagcaggacagtgccagggccacacagagactcagtctggaaagagcctgcctaactgcagatggagcctgaaccctgcgctgcagaaacactgagtgtaacgaattgtggttagagacgacattcaaaacaaacacacgttgacaaagtggaccatccctagagagctgtttttcagggagcttttcagcataaacgatggtgatggggacaacgggggctactgacccatgtcccacaaactcttgatctagtgtgagaatgttgtgaatgcaaagatgattcttgtagcagtggtgatacattggaagtactgtatttttcataaagcatcactgtaagagtccctgtagctattttctggtccctccctgaagaaagaatcaggagtatcaaagtattaaggaaatcaaaatcacttaataattaatcttttcttttcttttcttttcctttcccagccaattgcattgtaatctcaccatgtaaacatggatttggggtgaaataagaaactttaaaatgatcctcccttagagattgttgttatattgtccctaaacttaatgaaaacaattttaaactttagagtactaagaatgcaaagtacagaaagtagggcccgatgtggtggctcctgcctgtaatcccagcactttgggaggcagaggattgcttgaggctaggagtttgagaccaacctggctaacatggcgaaaccctgtctctactaaaaatacaaaaattagctggtgtggtagcacgcacctgtcgtgtcagctagtccagaggctgcggcacaagaatcgcttgacgccagaaggtggaggttggagtgagccaagatgatgccactgcactccagcctagggcaacgagcgagactctgtctcaaaaaaaaaaaaaaaaaaaaaagtagtcagtgttcgtttttcataaaggtgattaaaagaaaaaaaacttggctttttttttttttttttttgagaaggagtctccttctgtcgcacaggctggagtgcagtggcatgttcttggctcactgcaagctccgcctcccgggttcacgccaatctcctgcctcagcctcccgagtagctgggactacaggcgcgtgccaccatgcacagctaattttttgtatttttagtagagacagggtttcaccgtgttagccaggatggtctcgatctcctgatctcgtgatccaccctccttggcctcccaaagtgctgggattacaggtgcgagccactgcgcccggctgattcttcagtctttcttatgaatacattttctgcattgaaatcattttgtgtctttcagtggcaccagcctgtcagcttcgggagtatgtgcctgtaggcttcttgggctccaaaatccttgggaggagtggtctctcagttgtcgatcagtgtttatcacataagtcatcttgtatgttgtccaccaagaacttcaaataaattttctgattgaaaaagtaccaaaaaaaaggaaaagaaaaaggacagtaccttgaacattcagtaggtgatgctactctttttcagtagtttcatactagtttggagcctttggccaatttctgccataaaagcagacataaacatggaatttggccccaatttcttctcagtccctcagttgtatagggacaggctcaggtggtgtttagaagtttaagagtacactcgaaagaccattagtctatttttgctgtagttaaggtagaaggaggcctagctattattagtggggtttggtctatgaaagacaataaagtttaaaatgaatttggaagttttttgttattgttgttgttttgagacagggttgcactctgtcacctaggctagagtgcagtggcacaatcatggttcactgcagcctcaaactcctgggcttgagtgatccttctgccccagcctcctgagtagctggggctacaggcatgtgccaccaggctgggctaattttttcttttttatagagatggggtcttaccatgtcgacccggctggtttcaaattcttggcctcaagcaatcctctcaccttggcctcccaaagtgctgggattacaggtatgagccactgtgcccggcctggaagaaaattttaactaaataacaggtgttttgaaagtacagtattgggccgggcacagtggctcacgcctgtaatcccagcactttgggaggccgaggcaggtggatcatgaggtcaagagattgagaccatcctggccaacatggtgaaaccttatctctactaaaaatacaaaacaattagctgggcatggtggcgcatgcctgtagtcccagctactcaagaggctgagacaggagaatctcttgagcctgggaggtggaggttgcagtgatccgagatcgcgccactacactccagcctggtgacagagcaagactctgtctcattaaaaaaaaaaagaaaaaaagaaagtacagtattaattaacaacggctatcactaagggttttttttttttgtttttgtttttttgatttttttttttttttgagatggattctggctctgtcggccaggctgtagcgtaatagcgcgatcttggctcactgcaacctccgcctcttgggttcagcgattctcctgcctcagtcttctaagtagctgggattacaggcgtgcaccaccatgtctggctaatttttgtatttttagtagagatgaggtttcactgtgttgaccacgatggtctggaactcctgacctcaggtgatccacatgcctcggcctcccaaagttctgggattacagacgtgagccactgtgccctgccagcactaagtattgactgtctttgttttcagatcagagagaaaacttttagaaaacatggttctagccctagttgtttcttaattagagtttcttcagctttagtatggcatctgaaggtgattgcatcatatttcataatcacccagctgaactatttgctgtttagtccagcactgggcactgaggctaaaagatctttaatccaaacagcctcagcattcacccaacctgagcctatgggaccccaagcagatctggattcactgtcacttaccatctacccatctgaccctgtcttcctatgacagacagaaataaaccctgtagctatttcaccccacctacataccctgcacccctcctactccccgtccgactttcctggctgagaagttggcactgccctctggagcaggccctgtcaccagtgcacccctcactccacaggggtgtgtcattaatgtgttgcagttgatgcctccctcttaaaaaaaaaaaggggtggttgtcaccctggtgactcacacagggcttgctggctcaaactctggaatctgtatatctgtctcaagtgtcaggtctcccacctgaccacactttgctctgtttgtagttaattaaattgacattaatcaagacccaggtgaggagcagtgaggtaatagtttgcttgtattgctttaatatacatcatctgattaatgatcgtagcatgaagcagttcttaaaatatacagccaccatgttagggtgaaaaacctggatggttgccctaaaccaaccttgcgcttgggatcagggagctctttgaattcctataccgagtcacctgtttgagaataagactgttttgtttgtttggtttctgaatttgaacatttgaatttctttgtagcaaagcaaagcaaattggtgacataactgggtcagggaaagtgattgggagtcaacagtttgtattttgtatcatttttaggttgaattctcttttggcctaggggaggttgtgccagatgttgcattaagtagtgggaagattttggggggcagggcggtgtgtttggggaggtgtgaggtggcggggtggaataaactacaaaaagttgacaattgtatgtagaactcaacacagaattaggagcttttttgaactctgtttaaggggacatacagcagaaaaacaattttttttttttttagaaaaacaattttgtaaaatttgttctacatgaagtgtttttcaggtttgcggttgagacccaattattcttgggcgttacattgattttcttttcaaatgaagtagaatagaaataacagtacaggctgggtgcagtggcttatgcctgtaatcccagcattttgggaggccgatgcgaacagatcacgacatcaggagatggagaccatcctggccaagatggtgaaaccccgtctctactaaaatacaaaaaaaaaattgccgggtgtgatggaacgcgcctgtaatcccagctactggggaggctgaggcaggggaatccgtgaacctgggaagtggaggttgcagtgagccgagatagcgccactgcaccactccagcctggcgacagagcaagactctgtctccaaaaaaaagaaaaaagaaaacagtacgttgcatgtggtaaatttatgtttggtgaaacttttgtttcagttgtacatatagatttattagggtatgcgataaagcatgtcaccaccactcttcaggagtctaggtgtctcatcaggaatcgtttgttttaaaacaacatgaaaagaggcggttttggggattcctcagaacctgattttggtattgagagccttcttgtggtagattttccatgaacttgatattttccctattgaaattgtatttcgctttatgtagtttaacatctccaaagtccattctctttcaggctttcattctgtctcctgtgtttcctccttgttactggagagggaggggtgcagatttgctttcttgaggggttttcaccttctccctgaggcacgagggcagattgggaggtaactggagagggagagcagtcgtccccaagtgtcttgaggtgggtgggtctggagctttctttgtagaattctgttcactgcactggagaagtgatcgttcagccgatccacaccccgccctccccacagacaccggggccgaagttcccagagaagagcttccgcgtgacgaccccgcgggggtgacattctaacccgcgtttcagaggcaaccctgagttgcttgaggtcgcccagctcagctggcgcgaggtcagcagtgagcgcgtcgtgagtcagccttgggtgcggcccgcccggctttgccgccggtgagttggccacgacccttcggcctgcggagggcgctgggactcggcggggagggagccagccggagcccgcgtgggaaaccagcgcgcccaacgaggtgtcgcgtgggagcgcgccggagaggggcggtgcttccggggcggtaccgtccggccccgccccctcaactcaggggcccgccttctacgcctggaaccccgcccacgagctcctcccttctcgtcaggccccgcccctcggtcgccacgccccgcccagccgggcgcgggcgggcggcgtcgcctttaagagctccccggtgttttgggggccgcgggccgggcgcgctgacctggtgcgcatgtcccgggcggtgacgccggcgccgggctccatgtgtgcggccgaggggcgcattatctggccggcggcgcgggcgggcgggcggaccggcgcagcgagcgccgcgggcccgggcggccccacaggcggaacgagcgcgcgcggcccggcgtccccggcccctccgccgcccggccccgcgggcgaccccggaccagcagcccccgtaacctgcgcgctgccctagggcccggccgacccgcggcccggtaagttctggaccaaacttggcggggggcgggggctggggacgcacggctgagactggagcggcgcgggccgcgcagggtcggggcctcggggggctctgaaggacccctgcatgagcgtggaaaagtgagagcgagcgagttctactccttgtattctgggagcgtcttcttgcgctgccctggaaagttccttgccccgaggcggcccgggcacgtgggggccgggcgggggtcccggaaagtcgcggcgtcgccccgcttccgtcctgcgcttcctgcggggtcgggggaagggctgggccgcgaggcgcctcttccgagtggtcgggacgggtggaggcggcgggaagacggcacgtgggcgcgcggggcgggggtcccgctcaggggcgggggtccggggcgggttgggcagcaacgctgaaccccgcggcggcggcggcggcggcggcggcggatcccgtgtcagaataagagtccccgcgcgcccacgcctggagggccggccctcccccagctcgcgcccttcctgcctaacccccgggagccgcgggaccctttcccctctctgatctccggcctttctcaaggcccgacactttaaatttgcctccccatctaggcggtggctccattgatttcttttttcccacctagagtgggtcggcatcagtgactagacagcagcagctggccttttaaagggattattgccaagaatcggaattgatcacttcaacaaggaaaggcttatgggcagggcccaggctgagagcctgacggacacttggattgtgcgcacactgggacccagaaatgaatggtgacccctcccttaggaagtgaatgacaacccttaggtgcgtgtttctgccctgagaattttgcacagggcaaaattttgtaggtctgacttaacgtctttaggtgtatagttcatccttatcttaagagctgtggattctttagatcaaagtccgagtgagtcacttgagcctttaattttctttcttcctaccagtttacttctttcagttttcttggagtacatagtgctggttacatctctggttctgtgtgcccattcacacagtgacacctcctggctgtggcagcacagaaactgagagccctctgtgcgggtgtctcagtcttggactgtagtcctgttgactgacttaactcttctggtagtcgttacaagttttcttttaaactagattacatgaaataatgtttgttggcaccagtttgttaacatatgctaagcagtagtttgtcagacctgaccacaagctgtggagggctgatagctcatactagccctcgggtttgagtgcctactgtgtgctaagctcccctgcacagacatattcagtgcctataacaatcccgtggggagtagggaagtattatctgcgctttacaggtcaggaaattggggctgctggaggccaggcggcttgctcaaggcctcttagtagtgaggcagagccaggcagcccgtacttggtgctctagagcccacaaatgctgcagtttgcgaaccctagtgagcatttccctggcgcttctaaaatacaaggccattttcttgtccaggatccagggcacctctgtttgcggatgtaggggataatctggtgacatggggacaccatgctagccctgctttgttctagtggagcagcgttaccagctggattttaaggaactgaactacagagttagttgctactttgcattcgcttcttcagctttggactcagaaaagttggcccttttctagaggaaacagtttataggatgtgggaaatttgcaagggattttctgtatcctctgtcttcacttattccctcccctccttcatctttcagttcttatttgtctcataaaattccgaagctggtttttatgaagattgcttctcatcttggaagggctatagagaatggaaagatttggatgcagtgtgttttgtttgtttgtttgtttttttgagacggagtctcgctctgtcatccagtctggagtggcacgatcttggttcactgcaacttccgcctctcaggttcaagcaattctcctgcctcagcctcccgagtagttgggactaccatgcccggctaagttttgtatttttagtagagacggggtttcaccatgctggccaggctggtctcgaactcctgacctcgtgatctgcccacctcagcctcccaaagtgctgggattacaggcgtgagccaccacgcctggcggatgcattgttatttccactcagatgacatcattttttaaaatgtcaagtcatctctattaatgcagtatcatttggcaaatcctataatcttatattttgatagtgagggaaaaatataatgctactttcggtaggaaaaaatcctggaaggatttgtaccagaatgtcaataaaggtctctacattaggattagcaatagtttttcttttttagaaaactttttagtgtctctgtattttgcgtgtgtgtgtatgtttttaatgaggaaacatgttttaaatactctaattttcaactcttcagtagctcctctgacttgttttgcatcatttattttctgaatttctggcattgcaggtagtgatttctagattgatatattcaacaaatatcagagtgcatactgtgccttcgacactgcgaggaatccctcctcagtagagtttatagtgagattagtgggccaggagtcgtaattaatcttataaacatggggaaacttacagggatcaaggagagaaggacactgtgacctggtgagcccgaaaggacctttctcctactggggtcagagaacaagaagggggaccctcttgaaggggattaaggcaagggctggtgcagtgaggctcacagccgggacctctttgggtcttagcagatgactaaaggatgcctctgaagaatgtggctggtaaagttgtaaagccattcttgaaatgttggctttttttttttttttttttggtgtttgttctcttggaagaaaattaagaatgaccagcagagttttggatatatgaattcccaacagagacaaaaatgtaatggcccttaccactgaatttgtttaaggaccatcattagcatgtactgacacctcaaagcctgggcagctcagatgcttttctggagaactacctgcttggactcggggtgtttctgtgccatcaaatggaacaggcagggctattttctctagacctttcccccccataattgagttaatttatgctggttgtagaaaactaggaagattatgaaataggtgagtgggtgaagtcttctcgagcagctgtcctggggtaatagagcatccctgggatttcctcctaacccttgtctggttgggaagtgtggcagaaccagaagaacaagttggcaatgtcatagtttgaggcatacagaactatgctgcctgctaagtgtggtcgtttgttagaatggatgcttttgagttatctgagctgcttcgggaggtagctttccacagtctggcctcagactgtgggtcttccaggttaacaggacttaagtgctaactgtgcaaaggtatgtctttgaatggaattaggaaggcagtgtattaaaaataagaaggttgagataaaaaaagacggatcttgaagtggttggtggttgcagcgaggtggaaatagtgagacccgtactgtcagaaacaaaggtaccactggggacagatcccgctcgagcatgggttccccagcatccccgcaaacaggatctgggacttttttgtcaagagagtgtcagaccgttggcttcttgcccctcccccaccttgtgctttccagactatatttgtgacctctttttgtctgatggaaatgtaggttagtcttttagaagacaaaggaatttaccctaatagaatacctttaggtagcctcaggaagtgattgggaatccacgaaaccctctaggtgtgggagagaggggccctcagtgagaatgtcacacgtttgcaccagtttgcacagttgccagggccccttgcagctcctctgtacgctgtaccccctttgtctctcctcagcctccagaggcaccttcacaggtgagtttgtcagggaacttgcctttctgtctgattcctgattttagggttccttatatggaagggctgaagacctgcaatttccgaggatgctggaggctagcttctgagataggatttgctggcaggagatgagcagtactctaaaggagggctcccagcaagtcaaagtgggagttcttggggcagggggtgggggatgggggtggtgggtggagtggtcaaggcttcagggctttcctgctgcttggcctcaaagatagtagctatgcctgtggggaggggtgtggccatgtggtacaggattggggagaaattccacttgtttgaaggatttgttgaagaatccctcagctattcctcctgcagttccgtctcaggacctggcgctgcgtggcctgccttgccggttagatattctggtttgaaccttgaaacgtagcctaaataaggtggtgccttcgagcacacactttaaaaatactgctgcattatggtggcacagcagctcctcctgtgccaaggaggccactttgagtctagggggcacctgctttttgccaagtgtggccgtgtgcctattgctgagcagcctgtctctagtggcatccaggacagccctggctttgcctcaagacagcctggtgtgagctctgcccagccacttcctagcgaaagaccttgttgaacatcacccctgtttcccatttctgtcaagggggtacttactatctcccgtggaaggctgtgttgggagtgagataacaagtgcaaatgatcgaccccagtgcctgtgtgttccacatgttgcagttcagtgagtactgttatgactgtaacagatgagccagagttcacaagcattaacaactgccccacctcttctgtgggggatgacaccaccctcatggcaaactgtcactgtctgcatgccccctttggagccacactggggcgcatgcctcagctttgtgccccagcctattcccctctctccatgttcctgtgaagaaggcaaagttccccacaggaggtgatacttgccatagtcaccttgctcattattcggcggctgggacccaacccagcctttctgatttcagacgttgtctattttttccactgccttggggccttcttgacgatactgaatgcctgggttggttgtgccccaagccaggaggcagcctctttcctggcccagggcttgtggaagccagcatccggacttccatctgtgagatgggaagctgtttgccgggcagatctgtcatgggagccttccttagagaactgagaggggtccctgtcactgagtggactctgggtggaggctggaagtaggtggtttgatggtacttgcagtggtgtctgggagcgccagggtgaatctcatcctcctggacttgcctttcagactgacagctctccagccagcttggagttggacagatctggctttgtcactgacgatatgcagtttaccactcttcagcgttgggtgggtcacctgatcacctggcctcagctttctcttatgttggcggagacagcatctttgacctaacaggatgctgtgaggacaagtggaaagtgtctacaggcagtcaggggtattccagcctttgcctctccatttacctcagagccaaaaagctttctccccccagatgtcaactacacagtgattcttgaacacctcatatctcagttatcacatataatgtaacactcagattgaggagcttggttttctttataacagaatcctactgcaagctaacaatttggaggcctaagagtcaggtcaaggccgggcgcggcagctcacgtctgtaatcctagcactttgggagcctaaggcaggctgattgtttgagcccagtagttcgagacccgcctgggcaatgtagcaatcccccatctctctctctctctctctcttttttttttggtgggctgtctcaggccgcttttttttctctctctttttttttaatttttaattttttttttaatttttttgttgagacggagtcttgctctgtcagccaggctggagtgcagtgacgcgatctcagctcactgcaagctccgcctccggggttcatgccattctcctgcctcagcctcccaagtagctgggactacaggtgcccgccaccacacccggctaattttttgtatatttagtagagacggggtttcaccatgttggccaggatggtcttgatttcttgaccttgtgatccacctgcctcggcctcccaaagtgctggcattacaggcgtgagccaccgtgcccggccgattccccatctcttaaaaaaaaaaaaattagccaggtgtggtggcatgcatctgtaggccctgctacttgcgaggctgagatgggaggatcggttgagcctgggaggttgaagctgcagtgagaggagatcatgccattgcactccagcctgggcgacagagtgagactctgtctgcgggggggataaaaaaggtctgatcagattatctggaagggatgtgaaaaaccctgtggccctaactctacaaataataccaacttaacattttctccagtcacagccattctgtgcaattaacctttgagtcagtggctgtgaatctatactcaacacattcttaccttagagacggctgcttgccctgacctcggaggtgggcaggttttaggccagtaaagtaggcctccaatttacgatggattgacttaaaatttttcaactttatgttgggtttatcagaggtaaccccattgtaagtcgaggagctccctttgatttgtaacagtttctcctgaacacagatccctttcgtaccatggtaaagttgagaaattttaagtcgaataattgtaaaatgggaccagtggctgtgttaaatgcatttgatattttctactcccagtggggctgcattctaataaacccatcataagttgaggagcatctgtcttcttgttgctggggtttcaagttggtggaatttggtggtagtgacagcagatttttagttctcttgtgtgtttagcacaggctcactctgccagcaagttttgaaaactgctgctaccaccttcgttcacatccgcagaggaacatttttccttgttgctcaagtgtggctggagaaagtaggagagtggtgaactgaattcttggtttgaaggcatcgattgaattggttccgtcactctcgagacctgtgctgttctcaggacttgcgtatcattgacggaacacctgaacttcattttctgtcttctcatgtagtgtccctgggtttgccgagggttcatgcccaccccgttcagtggtggttctttcagaggattctgtagtcagctcctttcctagggttctcttatagccactctaacccagggagagtttgctggtgtgtttggtgtttttgtttttgtttttttgagatggagtctcactctgtcgctcaggctggagtgcagtggcgcaatctcggctcactgcttgaacctccgcctcctgggttcaagcgattctcctgcctcagcctcccgagtagttaggattacagacacccataactttgcctggctaatttttgtatttttagtagagatggggtttcgtcatgttggtcaggctggtctcgaactcctgacctcagatgatccacccaccttggcctcccaaagtactgggattacaggtgtaaaccaccgtgcctggctgtgtttgatgtttttattaatacgttcgtttgatgaactgacctcggtagtttgtatgtgggccatctgtctcctgcctcccttccccaaacttttggtcaagtttttagtgttgagtctttttgttgttgtctcttttctgactgtacaagcaacatttcctgatgccgaagtctggggagggggtgggagcctcagatgttggtggtaggagttgcctggtctgcttttgaagttttcttgggcaagtatattaacatatactgagtataggttcaaatgtaattgcagtcttattgttagtttgtatctgtcaggttataggattagaaatataactatttttgggagttgggtagcagacaaactgaggattctacctgggactttcttctgtgtactgtgctctgctgaacccaacactgggcacaaacaggaaactgaggctcaagcggaggaggagtggcctgcccaaggttgacttgcagaaggaatgaggatatatccctgttttctcctggaattagactttcagatctctgttgttcttactgatgtctttgtggcttggtgaattttgttttagcttccttcttactttatttatgtaggtccattggtcagtttccttcctcagggccttgtctttttttttttttttttttttttttgaaacagagtcttgctccattgtccagtctggagggcagtggtgcaatctcggctcactgcaacctctgcatcacggttcaagcgattcttgtgcctcatcctcccaagtagctgggattacaggcgcacgccaccacgcccagctctttttttttttttgtagagatggggttttaccatgttggccaagctggtcttgaactcctggcctcaagtgatttgcccaccttggcctcccaaagtgctaggattacaggtgtgagccaccacaccctgccccctttttttttttttttttttttttgagtcctgaggtcattttgggtgtctgtagggtgaggatggggcaggacatggggagggagaacttagggctgcctctggtttctcagggcagccttaaaaaaaaactatagtggccaagtgtagtggctcaggtaaccttagctctttgggaggctgaggtgggaggattgcttgaggctaggagtttgagattggcctggacaacatagtgagacctgcccccgcccccctccccccaaaaaaaccccaaaaaactgtagtagtgttgagtaggtgatgtctttactttttttttttttatgttttttagacggagttttgctcttgttgcccaggctagagtgcaatggcatgatctcagctcactgcaacctccgcctcctgggttcaaacaattcacctgcctcagcttcccgagtagctgggattacaggcatgtgtcaccatacccagctaattttgtatttttagtagagacagggtttcttctccatgttggtcaggctggtcttgaactcgcgacttcaggtgatctgcccgctttggcctcccaaagccctgggattacagacgtgagccaccacgcccagccttttttttttttggagatggagtctcactctgttgcccaggctggaatgcagtggcacaatcttggctcactgtaacctccgcttcccagattcaagcgattctcctgccccagcctcccaagtagctgcgattacaggcgtgcgccaccatgccgggctaatattttttttttttttttttttgagacagtctcactttgtcaccaggctggagggcagtggcatgttcttggctcactgcaacttctgcttcctcggttcaagcaattctcctgcctcagcctcccaagtagctgggactacaggcacatgccaccacgcctagctaatttttgtatttttggtagagacagggtatcaccatgttggccaggatggtcttgatcccttgacctcgtgatccacccaccttggcctcccccaaagttggaattgcaggcatgagccaccacgcccggccgactttacattttaagagcataaaactacttttccctgtatggttttttttcccccccaagagacatggttttgctctgtcacccaggctagagtgcagaggctcatgatcacaatcactatagcctcgacctcctggacttaagccatcctcccaccttagtctcctaaagcactgggattacaggtccccatctattataagatgtaattgcacttaatttgtagacatccttcaagtgatatgtgggtgaccatttaaagatacaaaaaaggagcacatggaaatgggaggagccaactaaatatcaggtcctgcactgggctccagtggttgactgtgttagtcccgggcaagagcgagggccttaacactgccaaggatgctggatgagacctggttaaggaaattgaacatgttttgttcagatgagagatgatttggggtgggggtggtggcaggttccggaaggccccaggatcttggctcaagactggactgaaggcctttcctgatgctggcaccaggcaggcttgctcactcccttgggaaatacagagggggttactcttactttccagagatgagatcaggtgaccctattgcaaaaggcagcagaagtggacagtggctacctggggaaggagctcagcattgagtgagcagctcagaatcttacactcaccttctatgaagtttaagatgaagggagctgctctactctgttgccttggtttattgcattagggaaaagaatacttaaattgcttggaaaaattggagtagttttgagctgtttagccagtcttctgagtttgtaaactactcttggttgtttttttttttaaactttttttttgttttgaggcggagtttcgctcttgttgcccaggccagagtgcaatggctctatcttggctcactgcaaccttgtctccagggtccaagcgattctcctgcctcaacctcccaagtagctgggattacaggcatgcaccaccatgcctggctaatttttgtatttttagtagagacagggtttcaccatgttggccaggctggtctcgaacttctgacctctggtaatctgcctgcctcggcctcccaaagtgctgggattacaggtgtgagccaccgtgcccggcctaaaacttattttttaaagttaatccgttgacattttagagcttaagctgcttcggcagataccctgtggaatgaaatgcagctgggctttgcatcaccacacagtgaagtgactggtgtaggagatgtgttgctggctgtaggattctctaagcagagcttcttagttggtgggctgggatgagtgacaggggtgcagacgtccttgtgggtaagtggcccctgcccttgaccagctccttaggctgagaatagcctcatcttactccagtgtcttccacacttagaattcttactacatggcagaagctgaaaaagatggggcatctgattacccccccacccactattctgagaagagagatgatttttcttggctctctcagtctcagggtatccacagctcctgtggagaaggggttcctctgcacgctgcactagaggagtgttgggtgcggggggtggagttggccattcaccctcctggacctcaggatttatggaaagtcatactgggaactaagggcgaaagcacaggttgctgtggttattgttgatgtcctgaaacaggagactgttcatacttcactctcaaaatatggagagccctcagaggtttctgagcatgacaatatcgacttgaattgggcagaagaaaggccattgataaaaggcaggcatgagctaatatggccttggatttgcctgacggaataaaaagcagggacaggtgccagagacactgcaggaagattgggtagggattaactggataccaagggctgaggacagttcatctgtttgacaactgttggagtgccttccctgctcgaccagtgctgagccccaggggtgtctggttgtgagggagattcctgccttccggggtcttagagcctcgtgggggaaacagggcagggtgtcatgatgcagacatctggggcactcagctaaagggcgggcaggagcggtgtcgtagcagtggcagctgaatgacgactggagggtgacataggccctcagattgtggatctttggttttaggggtagtgagctaggtcctggagggtgctctgggacagctgggtattggccctgggcagtcattgtcagctgtgatggccgaggatgcagtgggtgaggtgtggaggccccatgtgaccatcaggaccttcatgaatgaagagagcatggctctctgaccccatctgactggccagctccaggggcaggtgtagaatttgatccgtcctcgtgtgtccccctctccaaactgtagtgctttgtgttaggtgaaagtgtgacaagtaatagttgaaagaatgaaatatccaagggaccatctccatacattggaaaagtttgttctgctctgttcctatgaatgaaatagcagcagatggatggaagttcgaggaacacagacttgacttagcctgagaaagatctttgtagcagttggaggtatcgggaagaggctcagtgtgaacccagagccctgggagctggttgggaacccacattttctagatttctgaggattttccagcttgaggttttggacacttttccagaaagacccagagcgattaagacacgtctctgaaacaaccacatgaattattctaacagctgctgcttgctggttttaggaagtttccttgtttcatgcactgctcaaatgttttcagattctagctcttttggcagagtttgggggagaagacaggtgggtgtcccgctgtgacactggttttgagagtggggaggggttgtggtcgccggaaggaaaagagccctggggatttgccacttgggtaaaaatgacttggtatctgactagtaatcaccaagacccaaacagggtcattttggggtggaagtgaagtatcagatgagttaggtgggagtgggctgggatgtactctggctactgcccactccaaaaggcctcctagctgggcctgggctgtctctcagggcctgtaccctccaccatccttgaattcagtggccagggaacccgtcccctccccctggtctgtgcctgctctgctcattgcctcacatgtgtgagcactcggtggaaggaggaagggatgtctgcacacactccctgtcgagggaccctggcttgctcctgtggtgccctaagcatgtagttggcatgcatgtgtgtcacaatgaaaatgaagatgagaattggtcctagtttatgacccaggccgggtagtatttgtcgatccttccagccccttcctgcatctcgtacactggcagacagggactcagaggccaggtggctgttcctgcccatggaactctgagggtttccatgccttctacagctgggctcagtcctgggagtttctagcaattcagtagagggttaggttaacgtgcacttagaggaatagaggaatcctgggtctgtaatgatctctacatcttttttttttttttttttttttttaagatggagtcttgttctgtcacccaggctggagtgcagtggtgcaatctcagttcactgcagcctccgcctcccaggttcaggtgattgttgtgcctcagctgctcgaatagctgggattacaggcacaagccaccatgcccagctaatttttgtattttagtagagatggggttttgccatgttggccaggctggtcttgaactcctgacctcaggtgatccgcctgccttggcctcccaaagtgctgagacaggtgtaagtcaccgccctggatgatgcctacctacatctttggtagaggaagttttcccagagccttgggaaggatccagtcctaggaccgtctcaatcagattgttctcaatggtacagcggttcaggtttgagcctgggcctaggaggtggctgacctgggtctggattcccatctgacttattaagtgtgtgaccttgggcaaccatcttgactttttttttttttttttttttttgagacagagtctcactctgtcacccaggctggagtgcagtggtgtgatctcagctcactgcaacctctacttcccaggttcaagcgattctcctgtctcagccccctgagtagctgggattataggcacgcaccactatatccagctagttttttttttttttttttttttttaagtagagacggggtttcaccatgttggccaggctggtctcgaactcctgacctcaggtgatccgcccgcctcggcctcccaaagtgctgggattacaggcgagagccgtcgcgcccagcccatcttgacttttttttttttttttttgatacggggtctcgctctgtcacccaggctggagtgcagtggcgcgatctcggctcactggaagctctgcctcccaggttcccgccattctcctgcctcagcctcccaagtagctgggactacaggcgcccgccaccacgcctggccaattttttttttttttggtatttttagtagagatggggtttcactgtgttagccaggctgatctcgatctcctgacctcgtgatccgcccgccttggcctccgaaagtgctgggattacaggtgtgagccaccgcgaccagccccatcttgactttttttaacctcggttttctcttctgtcaggtgtggatatcggcggtagtcccttgcatgaagtgctgataacagtgtgggttccatcgtgtgaagtgtgggtacgatgacagtccctcgtgtgagtgtgggtatgatgacagtccctcgtatgagtgttggtatgatgacagtacctcgttctgtggttatgaggattaaatgaaatcaggcatgtaacgtgttggcacattgcctggcaccaaataaagaattcagtaattgttagccactgtttcctctttcagtaacaaaacctcttgtcaacatattagagatgattctcttggtgtccccaaagttttcagaagtgcgcttttctctagcagtttgaatccaggtgcctagcggtaactttctccgttgagggtcaggtcctccccatcctgcctcagcaatgcccgacggacaatgggggaggcctggactgtgaggatgcacgagcagtcccattctggggacagagacaagcagggcctggcttggctgcatgttagtgctggcataggggttaggtagggtctggatctgcttgaggtggcttgagatagagggagggagggccagggaggtgagggcagtaggcctccttggaggaagagaaggctggcccagtgaaagccagttgaatggatgagtgaactaacgcccctgcccctatggccctgcccctcctcaccccttctggcctgtactgtcccttcgcctgtccataccagtttcccagggcatgtcttgcatgtaggttgggttgtctaggcagcgctgtgcttcagtgacactttgtggttgacttgggaccctgaccacactgagagcagcgcgcttctctgggttggatggctgggttctcaaggaccaacggcttagaattgtggagggtggagtgtgtcccggccctgtgtttgtttgcctgcctgctgacatgaagcctgatgtgtgcagccactctactgtgtgcgagggaagaaagacatcctagtccgtgttggacatgggctctgtgtggcagagttcagcctcttgtggggccccgtcttactctgggggtgatgcaggtaaagtctgctgaggacctagcctaaggctgtgtagtctgacagatttcttcagaccttctctctcttttttttttttcttcttttttgagacagagtctcactctgttgcccaggctgggagtgtgcagtggtgcaatcttggctcactgcaacctccaccccctgggttcaagcagttctcctgccccagcctcccacgtagctgggattacaggctcccaccaccatgcccagctaatttttgtatttttggtaaagactagggtttcaccatgttggctaggctgatttcgaactcctaacttcaggtgatctgtcctccttggcctcccaaagtgctgggattacaggcgtgagccactgcacccagccagaccttcttatttttaggcagtgattctagtgaaatttacattgttctttataacatatcagcattttcatactgaagcctcttcccagcaaggaaaacgccatttgaggcagaaacagcaagcatatttcaaggctctgggattgcttgcttcccaccgcaggaggcaggcggtttggcctttgctatctggctcctcttggagcagggttccccaggtgccagcccccaccagcacagtttttctctctgcttgctccctggaagctggctgttgggccacacaagcagaactcctcctagctggcagagccccacgtccacctggcacctgctttccccaagcctcggtgtcccttctgtgacatctaagacttcagggaggcattgcttcctccatcttggcctcagtttatcctgtaagggctggggatagtggtgaggacagttgacagttctgtgaaacactctgaggagcccttgctcttcttgcatcttccaatcatacttttattgtctgatactatacattgtcaaggaggtgtggagtatgtgtacagccttgcatttctctattctttttgtttttgttgtttttttttttttgagatggagtctggctctgtcacccaggctggagtgcagtgacgcgatcttggctcactgcaagctccgcctcccgggttcatgccactcttctgcctcagcctcccaagtagctgggactacaggcgcccaccaccacgcccggctaattttttgtatttttagtagagacagggtttcaccgttttagccaggatggtctcgatctcctgaactcatgatctgcccgcctcggcctcctgaagtgctgggattacaggcgtgagccactgcgcccggccttttgtttgtttttgagttaggatttcgttctgtcatccaggctggcgtgcagtggcacaaaaatggctcactggagccttgacttcctggactcaagtgatcttcccacctcaacctcccgagtggctgggattgcaggtgcgcaccaccactcccagctaatttgaaaatattttgtagagacagagtcccattgtattgcctaggctggtctcaaacgcctgggctcaaagcagtcctcctgtctgtctcccaaagtgctgaggttacaggcatgagccaccacacttggcctatttctctcttaattggcgtatgcggtggcggctgagatttgctgatagattttgccattgttatagtttcttcatttatactttgcagcatttcagtcatcacatgatttttgtgatggctgtggtgcgtcatcagtttgccgcagtgatgaagcttctgggactaagaaccagcttgttggcctggttcttgggcaaggccctgagaatcctgggctgaatgcccccctgagctgaccacgtggccttagccagggccattggtgccatggcgtggttagtggatggttccagccaagtctgagaatttaccgaattgactgtttgatttggcagctgatggtcagagaaattgaattctgcctcttagcaaaggaagcttggtggatttctagaattctttgttgtagagggggttggggatggcgtgggcagaatgaatgcgaagtgtgggggcttgaggtctgccaggccctcccacttgccctaaactggacttggaggtgtctggaaggttgtgggtggacagcactgaccttgctgcttggccagttgttccccagccactctggattcggatctaggtggaccctatggtatcctagaaactacctttatgttcttttcttttaagaaacagtgtcttgctctgtcatcctggctggagtgtagttgcatgatcatgggtcactgtaacatttaaactccagggctcaagtgatccttccacctcagcctcccgagtaacttgggactacaggtatgcaccaccacacccagctagtttttaaattttttatagaaacagggtctcactgttttctagggctggtcttaaactcttgggctcaagtgatcctcccacctcagcgtcccaaagggctgggattacaggcatgagccactgcatgtggctttgtaagtttttgttgttgtttttgatacagggtcttgctctgtcgtccaggctagagtgcagtggcgtgatattggctcactgtatcctccacctcccaggctcaagtgattctcctgcttcagcgtcctgagtagctgtgaccataggcatgagccagcatgcccagctaatttttgtattttttgtaaagacggagttttgctattttgcccaggctggtcttgaactcctgagatcaagaggtctgcccccctcagcctcccaaagcgctgggattacaggtgtgagacactgcgcctgacctccactgagtttttaaattttttgtagagatgggggtctctctctgttgctcaggctggtctcgaactcctggcctcaagtgatcctcctgcctcggcctcccaaaatgctgggattacaggcatgagccatcatgcctggcctggcgctttacttttgaccatgtgacacacctgtggttggggtctggggcctcagaggcagcgactgtgctgtgcattggtgaaggaagcatcctcacctttccaggaggttgcccatatgacaggttaggtgttgttcctgcttgaaaaacaaacttgagctgggtgtggtggcttgtgcctgtaatcccagcactttgggaggctgaggcaggatgattacttgaagctaggagtttgagaccatcctgggcaacatagtgagatcccatctctacaaaaaataaaaaaggtgtggtgcagtcattgacacctataatcccagcccttttggaggccaaagtaggaggattgcttgaggccaagagttcaagactagcctgtgcaacaataaaaaaaaaaaaaaaacccaaacttgagaaaacttgccataagaatagaataactggaggttttatttcttggcattaagtgaacaaaacccagccactgaccgtaaaggtaatacaattagttgaaatattgcagtgtggggaggctatttgggtggcaatttgttggggacaaggctggctgtcattagaaccttctgtgtgcattctcctatgatggaggcagtgtcttctgccagatggagccttttgggatcctcccaaatttttttattttgactggtcctggccattcggctgttccctcccctcccctttattagagtcatcccaagaggactctgtgctttgtggtcacaggtcacacaggtgcatgtgcaaaggagatggcctgtttagaggtgaatgaggtgggagcaccagatagttgtttaccccctttccccttactctattcaggagcacttgaccaagccataattagcatgctttgcacatttccaatctgaaatgattggcaaagaaatgcccgctctcttgttccagttgggtacctcaggcggggtcactgggcattttgtttttcacccagcatctgtggactcagccacacaccggcctggcagacagctccccagtgcagcaactcccatgggcccaagggattataggcaggcttggagctcagaacttgacaggggacatagtggttttctttttcttttcttttctttttttttttttagacaaggtctggctctgtcgcccaggctggactgcagtggctcagtgtctgctcactgcatcctccacctcctgggcttaaggcatcttcccatgtcagcctctagcgtagctgggactacaggtgctccgccacgcctggctaatttttgtattttttgtagggatggtgttttgctatgttgtccaggctggtctcgaacttgtaagctcacgcaatccatccacctcggcctcccaaagtgctgggattacaggcatgaaccactgcacctggcccctgcagacatagtggttttctttttaatgatgttaattagtaggggcactatgggtgggttgtctggagtttcccttgtctagagttagatgtgatgggagctcagggctcatacccagccgtgggtccatataagtcttcgtgtgtctagcttgggtgctccaggaagtgtatttgggatgtctctggcttctattccacaaacttagaggagaagtttgtacccaagatgagctagtcatctccattcacacaacaagcattccttggcttatggctgtgagacaaggctagagtccccgggaggtactgttcttctgcagctaagagctgggatcaggccggcagacttgtccatctatgacataatgtgtggccgctgctgttacctcaccattccatgtgtttccagtgctttttaatttaatttttatttttttgagatagaatcttgctcttttgcccaggctggaatacagagatgcgatcttggctcactgcagcctccgcctcctgggttccagtgattcttgtgcctcagcctcccgagtagctgagactacaggcacacacccctacccctggcaaattttttttgtatttttaatggagatggggtttcaccatgttgcacaggcaggtctcgaacttctggccgcaagcgatccacccgcctcaacctcccaaagtgctgggattacaggcgtgagccactgcccccggcctccagtgctttctttatgcggcttatttgagaagcggagggaaggactagttggtagtgaagcatgtcagtggcatggctgagctggggagcagagtttcagaaccatgctttgtttggcaccatgggtataccaggctcatgtgctttttttctgtacacgctttggcatgtgatgtgtgtggctctgccttgaggacattatgctgagtaagagaagtcaggctcaaaaagacacacttatgattgcacctatatgaggttcctagactctcaaattcttaaagacagaaggaagaaggggggttgccaggggttgggggcagagagatgagagtgagtatttaatggggatagagtttcagctggggaagatggtaagttctggagatggatggatgatggttgcacaacagtgtgactgcacctaatgccactgaactgtgaactcaaaatggttaagatgtaaattttgtgtacgttttaccacaataaaaaaatgaacctttctgaattcagaaatattctatacctttatgacaacatgtattctgtcctctcagaattagcttggggacaaagggacaaaggcacacacactcatttcctagcttgtgctaagtactgggggtgggggtggggttaaaaaaatgcacgtggttctagaaggctcttaatgacatcatcttgggatcacaatgttagagtgcggatattctatgggttttcttcagtccctggacaggtggggtcatcctaggacccctgcaatctttaggggatttagggagaaacagtgtccaggaacatctgaggtctctgttcccgtgcattgcttggggattgaaggtatttctttctttctttctttttttctttttagatggagtcttattctgtcgccaggctggagtgcagtggtatgatcttggctcactgcagcctccgcctcccaggttcaagcgattctcctgcctcagcctgctgagtagctgcgactacaggcgtgcgtcaccacacccagctaatttttgtatttttaatagggacatttttagtatttttagggttttaccatgttggccaggatggactcgatctcctgacctcatgatccacctgcctcagcctctcaaagtgctgggactacaggtgtgagccaccgtacccagcctcgaaggtattttttattttcctatatctgtttgtcagtgagtttcctttaatacagcagtgtgttggtatttttattttatttttatttcgagaccagttcctagatcctcagtattagagaagtcatttcctcttttgttcttgtgacattttcttctggtgtcctttaatactgcaatacatcaggcatctgaaatactaaacacttaaatgtttcagacacttcctaaggcctcagtgtcatctgcacgtagacatttggtttctgggcacttaagatctggggtcgataggcagtttaggactgctgcatgcactgcccaggcagctgctgggagcctgggtggaaacaataagaggagcatccagatagaggtagcaatgttttgaggaacaacattaatcataataataaaagaaagaagtagttgcttctgtttgagaagctgcctggtgccagggcctgtcactgggttctcaggatggtctggaggcctgaggtaggttccacgcaggcaggcaggctccccgggagggcattgggcccactgtttaactgccaggtgagccaggctgggcagaatgtgctaggaggaagctcgtgagcatttgggatggtttggagggaggcctggagtgccagggagcgagaggggtgtggtgctggagtctgagcttaccagagggcagggctctggacccgcatgagaactgtgaatggggttttagggtgggacacagcctctgccataagaaaggatacggggagtgcagagtgtgggcaccactgacactggggcaactctcaattctcagtggtggcctgagggaagcccttcagacacagggtccccacagctccccaaatagcatgccaggggtggggcaggagggggacattggccgcgccccgaagctctggactcaccccaggggctgtgccgtgcccatggctgtagtcttgcctatctccatgtggcttcttcctggcactgattaactattttaattaaagacagcatttgtatgtttttttttttttttttgcctccagccggtggtagaaacctcttggttgggtcctgacaactcgtggaggtccccattttgtagtctcctcctccgtgcccacgtgggtgttagatgaggtgatgcgcaagcgccttgtgtccatggagcatggagcctttgggaagtgggatgctcgatttcaagtagcaagtttcagcaaaaagttccagcatcgtggtccatggtgaggggctgggggggagagcttgcctgagtaacaggtgcttgaacccaaaggatgggtgggagctaggaggggctctcctggccatgggaacggtgcgtgcaaaggtctggcacggggagtaggcaggcgtgctgggtctgaggaattgaaaggaggccaggtggttggagcgggagcatggaacgtgtatgctccttcacatgcacgtagcgcacttgcggctgaagtgggccgggccttgaaggccgtggtgaggtgctctgacgctgggtggacctgggaaattaaggagggccgtctggtttattatggggagtagaagatggtggaagtggaagacagccagtacatgccttaggctgccggcctgcccctgcctgtctcctccttcaaggaggctgtggttcccatggctgagggaggagacaggcaggggcagaccaggggcctacaacatgtactggctgtcaccctaatgggaagctcagtttgagagcagaggtgggaactccggcctccagtgccagctctggttgccaaggatgggcttgtgtggccaacctcacgattgggtcttggtcctcccggggctgattctccgcatctctagtctgccaagtcatactcttccccacagagggttgatggggctctgtgccttggggagagcggggactgctcagggaccgacctgaacacctcctcaatgtgcctctcccctgacttcttggcggcagcttgctgctgtggctagggctacctctgtctttttactgagtagctcattgggcagtttcctcctgatcccccttcaaatctcagtattgggatttgggccttatggtctctgttgttaaaggtggaaacagccatagacagtgtgttcttgagtactgacatggctgtttcccagaaatacattatttactaaggtggcaggcagtagtgtgctgaccccagactggaaaactggatctgtggcccctgctaattcttctccagccagccagccagcgcatggtagaccagcctgacttctgggcttcctcaggatgatctgctgttgccttgcttcagttttttctttccagattgagctggggacttccccacattgaaagtttgatgggaccattagcaaagagggtctgggtgaccctgtgaagggggcattcagtttgtgcaggacctaggagaggggcgggagaaggtgaacggtgttgttgggtttcaccttggatgttgttggccatgtcatgttcccaggattggactggagccaagctgtgtttggatgcagaactagttgaaaaattctagagacagcacaagtttttggtgactacagatggtgataggtcagtgggtctgggcccagggaagggacaacggggcttcctaggggcacctggtagagcccatgcttccggatcaggtgctgacagctgcagagacaccatcactgtaccagccatgggtgccgcaaccccagcaaccccatggaaccggagttccccaggtagtggccagtgtcaggccatgtgtcctttcctcaaattaaaaggacctcgctagcctgagcttgagaggataaaatggcaagaaaggacttctgttgcccaaagtgcagtgacttgatttcatgtaaattgccatagctaccttctcaccaaggctgatcttccctcagtttgagaagtccttgtgtttgggtgggttgtatggtaggggtgtgtgtgtgtgtgtgtgtgtgtgtgtgtgtgtgtgtgtgtagtacccaggtgcaaggtcaaagccaaaccataatgatttatcaagggagcggaagagtctcttatgagctggtaattgtgcacttaagggttacttgatactgctttaaatgtatgggttggagataaaaacagtaaaagctctctgaactcagccagtacggggtggatggcaaaacagtccaaatgatagattagtggaaagcgattacagtgtattttcaagaaatgctgctagttgtgatcatgctgagtggtcttctgcttggtttcctcctctgtgaatcttgcactgattgtattgcagggctcctgcagtgggctcctcagatcggccccttctccttcagggttaaactatccctgctcgtccattcaataaatatttattaagcggctgggcgcggtggctcacacctgtaatcccagcacttcgggaggctgaggcaggtggaacacaacgtaaggagttcaagaccagtgtggccagtatggtgaaaccccgtctctaataaaaatataaaaattagctgggcgtggtggtgcgtgcctgtagtcccagctgctcgggaggctgaggcaggagaattgtttgaacccaggaggcagaggttgcagtgagccgagatcgcaccactgcactccagcctgagcaacagaccaagacttggtctcaaaaaaaaaaaaaaaaaaatttactaagcaccacttatgtgtcagacactgttgtaggtgcttgaactaaaatcgggcatcaggcagatacccctgcccttgtggtgtgtacgttattgctgggtgagaaagttcatcggcaacacagtagctgtgttgtgtggagtgtgggaggggtggtgctgtggaagaagaggagcagggtcgggatggtgggcctctgtgaggagacatttgagcaaaggcaggggtggtgggggatcacacggaggggttaattttttatttttatttattttgagatggagtttcactcttgttgctgaggctggagcgcaatggtgcgatctcagctcaccacaacctccatctcccgggttcaagtgattctcgtgcctcagcctcccgagcagctgggattacaagcatgtgccaccacggttggctaattttgtatttttaatagggacagggtttcttcatggtgtccaggctggtcttgagctcctgatctcaggtgatctacctgcctccatttcccaaaatgctgggattacagacgtgagccactgtgcttgacagtggtttttgttttgttttgtttttgtttttgtttttgttttttgagatggagttttgctcttgttgcccaggctggagtgcagtggctcaatttcagctcactgcaacctctgcctcccaggttcaagcgattctcctgcctcaccctcccaagtggctgggattacaggcatatgccatcatgcccggctaattttgtatttttagtagagacgaggtttcgccatgttggccaggatggtttcgaacccctgacctcaagtgatccaccccgcctcagcctcccaaagtgctgggattacaggcatgagctaccgtgttcggctgacagtcgttttttaaaggtcgttttcaattcgggatgcagattgaatagttaattgatagatgaaatgacagaactaggattttgtttaaaacataaaaagacctcaaagtggggagggtcctagtgtgttggaggcacggccaggaggccagtatggctggaacagagtgagcaggctgaagtggggatgggatgcttgggtctgcaggcagtgtgtgggcctctggggttaggagaggatgggcttcactctgagtgaactttgagtccacgagtgaaagcagagaatatagtttggagacctccatcccagtagaggacagtgtggccagtggaggtgtgaggagtggttgggctccagatatatttaatggcagaaccaacaggctttcctgagtgactgggtggtgggtggagtctgcccaaggggacaactccaaattttaattgctgggagaatggatttgccacaagctggctttgaaagcagtggtagagtgtgaaagaagttaccttaagacttcttgccagttgcactgtaggtacgatgtactgtttgttgtgatttgactttcctccaccacccccctgccccaggaagatgtgatcttgtgcatcttgtgttcacgcagagtagggtagttggatctttgtcaagtctcagtgatccacatgcgtgcatctattttgtcagtctgcttgtctttgtatccatgtcatactgtcttgatgtagctttatgttaagtctcaaaatcagttgtggtaagtcctccaaatttgtgcctgtttttccatgttgttttcgttattctaggtccgttgcacttccgtgtagattttggaatcagtttgtcatttcttcaaaccatctgctgggaatttttgattgagattgcattgaatctgtagatcagtttgggagagaattgataccttctgacccatgaacaagacacatgtcttcatatacttcagttttctttttttttgttttgagataaaacagtattttacacaagtgaggctattgtgattgattcatgcaaacaacaactttagaaacatcttttaaacatgttcagagagtgtataacatacaacagaaattgatgaaaagtgtaacactaaaataaaattattctcatttattactgcaaggagtacctccccataccccccctttttttgagacaaggtcttgctctgttgcccaggcaggaatgcagtggcacagtcacggctcactgcagcctcctgggctcaggtgatcctcccacctcaacctgagaagtagctgggacctcaggtgcacgccaccacacccagctaattttcaaaaattttttttgtagagatggggttttgccatattggccaggctggccttgaactcctgagctcaattgatctgcctgccatggcctcccaaagtgctgtaattagaggcatgagccactgtgcccggccttctttcatttttcttgttgtttcattgtagtttctttatccttaagtatttcaccttttttgtgctaatgtagatgacttttttcaggttttgagttctgattggtttgtgcctgtgtgtagaaacacagctgattttttatatatagaccttgatcctgcagcagaacagcacaggacacctgcttctgaggcttcccaccctcggggcagagaggtcttggattggcagatacaaaatagttaggactaatgctgcccattgggtttctcagcttgaatggggctaaaaagagcggcagaaagggttcttcctgaggagctagccctgtgcctcatttaggaggtgcctaaaggtctttccatagagttcactggtgttgtcccctatccttatttttgcaagttctcctgtgggagtgtttctcgccatccatcagctgtgaattgccgtgaacctagtttaaaaataaaggtttcatatcagagcaagctcctggtagtcctgtgggtgcaaagaatgacaacagaggtgatgttgacactatttggcaagctacaactgacagaactgcttgggaatctgggatttggctggttcctaaggttcagcctctggcccatagccctggacgtctgatgatacaaaccggaagtggaagtccgaggcattttctctatgaccttggaagagaagttcctgaatattgtagagcattagttttcctgtctgtaagacaggcagcctctttctctctggacagcatcccatggggatgaccatgacctttggttttggaggtgaagccctctcggtctggagggtgaagtccgctcattcccaggcacatcatgccctcatcttgagggtaaacctagcactgccttcaccaggaatggtggctggtttccctggggtccatgacagacaacatgatggtgaggaggttacattgggagaatgagccctgcgtgctgcctgtgtgctctgtgaccctgggcaagttcctgaagatcagacacatcagatcccttatctgtaaaatgggcatgatccaggaacctgcctctacggttgccttggggattcagagatgctgtgtgagcatagtacctggaacatactcctaagtacctattaaatgctaggtttctgggttgttttttgagacagggtctcactctgtcgcccaggttggagtgcagtggtgtgggatcttggctcactgcagccttaacctccctggcttaggtgatactcccacctcagcctcccaagtagatgggaccacaggcacacgccaccacacctggctaatttttgtatttttttgtagagacagagtttcaccatgttgcccgggcttgtctcaaactgctaggctcaagcagtcctcctgccttggcctcccaaagtgttgggactacaggcgtgagccactgtgcctggcctgtttctgtttttaatgtcattactattataataaaaaccctgggctgggcacggtggctcatgcctgtaatcctagcactttgggaggtcgaggtgggtgtatcgcctgaggtcaggagtttgagaccagcctggccaacatggcaaaaccccgtctctactaaaaatacaaaaatcagccgggcatagtggtgggtgcctgtagtcccagctactcgagaggctgaggcaggagaatcgtgtgaacccaggggtcagaggttgcagtgagccgagatcgtgccacttcactccagtctgggcataagataaaaataattgtatttcatcgtgtgactgctttttatgtcaccatctgtattggtgaagacagtgtctgggacgttggcgttcattggttagcactgtattgtttcatacctcagagatcagtagaaatttgtttcctccgactgtccccattgtggaaggtagctgaggcaaaactcaggaaatctgaaattttgctatgtaattccaggggttagagacattttagaaatgccagtatgttccagaaaccttgcttggaaacacagtgtttctttctctgtcctttgctttaggttggtcagcacattgtctcaagtagccttttgatgtcactgtggccatggccaactggtaggaccagcaccccataccccgaagccaggtgagtgcttggggtgtagtgtctgtggaaggaaggttccacgcatccagcaggcttcggtcagcttcttggacactttaaagtgagtgctgcttcagccacctcctagagaagatggagggaggcaggccccctgggatcgcacactgtgcagtctgtatggggctgcctggcccgtcccttcaggcctcagggaaaaagaaaccattctgattggtcattcatttgaaaaccctaggtctaaataagatgagcctgtcctctctgaggggcaggggcagaggataatcctggccagtggcctttgccctctggccattcccatgatttcccagcagtgatagatgccgttagactttttccttattcaccgcaaagcccagggccccacactggttcttggagctggttgcccttaccttgcctcgtgcctcatggcaaagctaagctgcccccgctgcgtggagctcttaggcagagactgtcaagagctgtaccagggcattgctgggtaccttggattttctctgttaccatcaagcctggtcagcgacgttttggcccaaggctacctacctggagaagaacgcagaactgaaagatgtcttagaacttggaggcagcccctgggtcagctgctccgttttatagatggggacacacatgggccagagttggcaggtgacttgcctagggattcatgccccatcgaacaggatcttgccggtcacgcagtgtgagatgtggctgctctgctgaccatggcacagaacaagtgttgcggtcagttttgtgaggtttcagctcttcatatggcaagaaaatatgggcatagtcaggtaattctgttgtcaggaaaacatttccagaatgttctccaaacaaaatgaaactttcgtggtacttatatttttattttttatgttttgagacagggtctcactctgtcacccaggctggagtgtaatggcatgatcatagctcactgcagcctcaaactcctgggctcaagcgatcctccccgcctcaggctcctgaatagctgggaatacaggcgtgtgcaaccacacccagctaatttttgtattttttgtagagacggagtttgctgtgttgcccaagctggtcttgaactcttgggctcaagcgattctcctgctttggcctcccaaagtgttgggcatacaggcaaattacactcaaaaaaattttttgagatataatttgcataccatacaattcacccatttgaagtgtgcaattcagttttttatatatattcaagagttccacaattaccacctttatttaattccagaacattttcattatcccaaaaggaaacagcatactcattagcagtcactcctcatctccccctcccctttctactgatgacctctaatctactttctgttgatttgcctgttgtggacatttattgtaaatggactcttatacttgtgtaagtggccttttgcgtctgccttctgttagcgtggttcatccacattgtaagcatgaatcagtgcttctttcctttttatggctgaatgatattccattatatggatgaaccacattttgtttatccattcattcattgatggacatttgagttgtttctacttttttagttattgtgaatagtgctgcttttaacattcgtgtacaagcttttgtttgaatgcctgtgttgcgttcttcttagtatatacttaggggtgcagttactggatcatatggtaactttctgttaatctcttttcaggaattaccagactgttatccatggcgcctgcactattttacattccctgacacttacacagggctctcaaactctttggagacaagttcagactcaaagtctgtgccagtttcctacagagagttgagacttgtcagagcctattacctggtgctgttgtgctgtaactactatttgggggatgtcaggcattgacagaaacagagggtaggactagggactcagagtcacaaagccacatggctctcatcatgttggctcacctcctttttggagataggctctcgctctgtcacccaggctggagtgcagtggtgtgttcatggctcactgcagcctcaacatcctgggctcaagtgatctacctcagtctcccaaatagctgggactgccaggtgtgggccactgtgcccagcttgagctcaccccctttgttgagggggaagcacccacagccagcccagggaagtgagtgactgcctcttgtcctgcagcccagggcattgtttgagggcagcagggctggctgtagtttctcctaggccccaggctgggtacccacccctctgcctggccctttcttaactcagaagcacatggtctgagcagtaggtacttgttcaatgaataaatgaatggaggaaacctccctcttctctgttgccagccagcagggaagacccagccatagcattcaggcagtcagtttgggagttcagaagggaatttccagaggccaccccaggttttcctttggcctgtgcttgaagggacttgatagaaaaggacagtctataaacagtcgtggcacatgatacttagtggtcaaataggcggaagccacccccgaataattatttcttcaggacttataaatgtgtcagcttgtgtgcactttttgttgtgggtgtgtaagacagcccagcatattgatagattttaggttttctccacaaaatgcaagtttcacccactcttgggtgtgtctcactcagcactagcccacacttgctttaagtggaaattatggactgtgattggctggggtgtccccattcctgtcacccaggaccacatgagcacagtggagggagcagggccggaggagggctggccctcaatgtgcccagcagctccctcccatgtctgaggcacacagtctacacacaactcccacttgtgtgtacatttattcttatgggcacaggggcagtcttgcctgttcatggacttggtgtctgcccttgaatttggcctgtcaggtcctctttgttaagcaggcacgcactgcctagtgctgggtgttaaggatcaaaaaatgggtgtgactgtagaaaaacagattgcatcacaggacaggtaatgcacatgggcctggaccaaggtgtgaatgatgctcagtctttctaatataagaatcctgcacgttggagcaccaccaagacatttctgggttggcaagcacatggagtagacactgttctagtgatgggagtcaggtagtgccgtggtagttgcttttggaattcacaacttctctcaggggtatttgcaacatctagcaaaaggacaagtggtcaggtgcggtggctcactcctgtaatcccagcactttgggaggctgaagcgggtgggtcatttgaggttaggagttcgagaccagcatggccaacatggtgaaaccccatctttactaaaagtacaaaattagctgggtgtggtgatgcacgcttgtaatcacagttacccggggaggctgaggcaggagaatcgcttgaacccaggaggcggaggttgcagtgagccaagatcacgccactgcactccagcatgggtgacaaagtgagaccgtatctcaaaaaacaaacaaacaaaaaacacaaaaaagcaaaaagacatgtgtttactctttgctccagcaaatccacttctggaaatgtatccgaaacatggtcagaaataaggaaggattacaaggattgtgttcattacaacactccggaaacaaacaaagctgggaatgacttagatgtgtcagtgttcagactgggcaacttgtggtggtggctctgcctacagggtggtgcctgagcccctgagtgaagggaggaaggagtaggtgatgtcttcatttgtggtggtgatgggatttctagttgaaatgacaagcagaaaaaagaacaatgtaaaggaagaagagatggagtgtgctgtcacttatctaaggaaaggtggggggatttgctcattttatttttatttttatttattttttatttttatttatttattttttttgagatggagtcttgctctgtcgcccaggctggagtggagtggcgcgatctcagctcattgcaatctccgcctaccaggttcatgccattcttctgcctcagcctcccgagtagctgggactacaggcgcccgccaccacgccctgctaattttttatatttttagtagagatggggtttcaccatggtctcgatctcctcacctcgtggtctgcccaccttggcctcccaaagtgctgggataacaagtgtgagccaccgtgcccagccactcattttatttttatacaccataaaggaaccacattgtcacctccaggagaagggatggagagggcactgggagactttttcacgtgtcctttctttgtagcatcatgtacgtgcttcacataattataaaacaaaagccaagtggtggcagtggaaggggaagcaatcccttaaaaaccaaagacaaaaatgaatgaatctaggtacatgtcagttgtaacacacattggtgacttaacctctcagaacttatttctgataactttaaaacgtagtttgactgtaaatgttttagcgagatacccaataaaggtaaacaaatttatttccttctttccttcccttcctttccttccttccctttccttccttttcttccttccctttccttccttttcttccttccctttccttcctttccttcctttccttcccttccttcccttccttcccttccttcccttccttcccttccttctttccttcccttccttccgttccttccctcccctcactctgtcacccaggctggagtgcagtggtgcgatctcggctcactgcaacctccgccttcacgtttcaagtgattctcctgcttcagcctcccgagtagttgggattacaggcgcccgccaccatgcccggctaaaaacaactttcttaaaatcttcagctgttttttggaatcctggttttggtttcagggtaacaatattagcattattcctgttatatattgtaggagaaaataagtaagtaatgtcattaagaaccaaaattttccacacaaaaggaaaatgcaataaaaacccaaagcactagcttttttatttttatttttatttttgggcagggtcttgctctgccacctaggctggagtgcagtggtgtgatcatagctcactgcagcctccagcagtccttccacctcagcctcccaagtagctgggacaacagatgcaccaccatgtccagcaaatttttaaatttgggtttgtttttgtttttgtttttgttttaagacggagtctcgctttgtcacctaggctgaagtgcagtggcgtgatttcggctccttgcaagctccgcctcccaggttcatgccattctcctgcctcagcctccccaacagtagctgggactacaggcgcctgccacaacgcccggctaattttttgtatttttagtagagacggggtttcaccgtgttagccaggatggtctctatctcctgacctcgtgatccacccgccttggcctcccaaagtgctgggattacaggcgtgagccaccgtgcctggcctggtttttgttttttgagacagagtttcactcttgttgcgcaggctggagtgcaatggcacgatctcggctcaccacaacctttgcctcctgggttcaagtgattcttctgcctcagcctcctgagtggctgggattacaggcaagcatcaccatgcctggctaattttgtatttttagtagagatggagtttctccatgttggtcaggctggtctcaaactccaacctcaggtgatcctccagcctcagcctcccaaagtgctgggattacaggcgtgagccactgcacctggccaagacctgaagtactttaagtaaaacgcttaattctcattctgcattgggaacatggtaattgtgtaagacacactggggttgtatcagaaggacccacaggggccctgctggcacagatggggcaagcgagagtgaacaagaacaaggagcccctgagttagatgtgttaaaaatccaaggctggctggatgccgtggctcacacctgtaatcccagcacttcgggaggctgaggcaggtggatcatttgaggtcaggagttcaagaccagcctggccaatatggtgaaaccccgtctctactgaaaatataaaaattagctgggtgatagtgacgcacgcctgtaatcccagctactcgagaggctgaggcaggagaattgcttcagcctgggaggcggaaagttgcagtgagccaagatcgcgccactgcactccagtctgggcaacagagtaagactgtgtctcacaaaaagaaaaacccaagggtttaagctggctgtggttatacgcacctgccatcctagctgttccggaggccaaggccataggattgcctgagctcaggagttggagtctagcctgagcaatgtagcaggaccccccaagctgaaaaaaaaaaaaaaaaacccacagtttcttattggtgcttaaaggacaaggaagaagctcactggtcccctttggtaggagttagagagctagctacccatttaaaaatgggtagagggaaagcaacaggcatttttcctgcatcttctctgtgggctgcacactccaggaacgagagtgtgggcgagggcaaggttccctcgcatggcagtgctggcccgcagaactgcctagggtgacagggatgctctacaccgtctgccctgcgtgccgtttaacatagcatgactgaggacacggagtttaattttgtctatttaaatagccacatgtggctaatgggcagcacagctattgatgtgttttagcaaattaatatgaaatgacagaattttaagtttattgcagtcacctagtgaattgaggggttccagactgtaaggtccagacagtgattctccctagctgctagcccccaaggagagtgtcctgtgcttccacagggacacgcactcaccaagcctcaaggtctagttcatgagaaattgggggtatgtgcacttacgccacagggacgccatttgcaaaaccaacaatgggaaacagggcaagcatcctaactctttgagcatacgattgtgtcagtaaggggacctgtggattccagccagatatgactccaacaaagacggaagattgtgaaattatcaaaggtgggatcatagtgttgtggtcatgcttgttctgtagagataaatactgacccctttagcacaaatgcatgtttcataggatttgcttcgtggaagctagtgggagagagaaggagaaaggagcggcatgtggaggacacgagggtggtccccgatggccgtggacctgggtggtaagcacctgcagttaatcacaccattatctactctgtgggtggatttgaaattttccttaaagaaaagtgtgaaaattgggtttggcccaggtcttttctcagggagcttcgtgactggatcatctagaagaggggaaatggccatttataaaagctgaggtagaggccacttgggggtagtttaggagaccacttgggagtagtttaaattcaagcagaaaaccatgagcagagactggaattgccagaggggaccgtggcctgtcagcccaccagacagcctctcttacacactcttattttctgtaattacaacactcacagctactcttcgtggagccctcaggaagtgttagcaataaagtgggtgctgttcccattttacaggtgaggaagctgaggcccttgtgggtgaatcaggctttctggctttgactggacagctaagggcatgagcttctgggcctccttcctgtcgcctccctgctcagtacctggggcacatctgactaccactccagtaccctgactctatgatgaaaaccattctcccctccccattggtattgcccatccacagcagtcgtagcccatcacgagtggataaagtaggtggttagctggacttgcacatgacttgtttcgtgaacagtagtgcttagagttgtgatctagggacccagcgaacagtgtgtgagggacttcaaccctgcctctctccggtatgtgctgtgcctgctgtgccccccactccagtgttctccttggggctcctgaggcagctcccagtaggaggcctatcgttgttggcaccccaagggtgtccctgatccctaagtagaaacttaagcaggtatttggacaaataaatgagtgaaacaccttgtgacgttgaggcctgtggcacttccccaatagtgtgttagtgtaaaaccaccgtgtatgatgcctgttggtcccagcactttgggaggccaaggcatgtggatctcttgggcccaggaatttgagaccaccctaggcaacatggcgagacctcgtctctacaaaaagtacaaaaattagccaggtgtggtggtgcgtgcctttagtcccagctactcaggaagttgaggtgggaggattgcttgagccctggaggttgaggctgcagtgagtcatgattgtggctctgcactccagcctggacaacagagtgagacctcgtcccttaaaaaaaaaaaaaaaaaagccaccatggcagttttgttttatttggattttaggcagtgtagggcctgtgataaggcctggctgaggtggggctctgctggtagtaactcttgtgattccagccctctgaggccacttcctctttctgccttggctcctccttggtgaattctcccttatgtgtcccacattctcatactcccaggcattggatctttagctgggagatggttctgagttcccatgtgtacagtgggcttgctgcagcctcctgcagttgtcctgtaggactcgtggttggtggtgacatagaggctgcctaccctgatggctgatggctgatggcagtgtggttgtttggggtcttgttgtataaaaggagcatgtttactgaaggacccagttctgtgctgttggggtcacagcaaacctgcttttgcctgttagtattttagtagctctagaggggttcatggctattggaattagtatttttgtttttgttttcttttctcacctctttaaaaaagcatgtaaaattcacatggtagaatattcaccagttttaacgtttttaaagtgtgttgtttagtggcatttaacccattcacagtattgtgcaaccatcacctgtaattctagaacattttcatcacccccaccccaaaagaaaccttgtccccattagcagtcactgccttttccttgactctgctctccaccctcccagcagccacttattctactttctgtctctgggtttgcctcttctggcatttcatataaatgggatcatgcaatatgtggcctttttgtctgactttttttcacttagcatgatgttttcaaagttcagtcacattgtgtcagagtttcattcctttttatggccaaataatattccattgtctagatggaccacattttgtttatccattcatccattgatggacatttgggttgttttctgctttttggctattgtggataatgttgcttttaacattcacctgcacatttttttttgaatacctatattcagctctcttggatatacctacaagtggacttgcaggacactcgggagcatggtgatgccgtgggctggaggccctgcccaggctcatgtgggaactctgcgtttaactttttgaggaactggcagaccgttttccacatcactctactgttttactttccactgttttccacgtcactctaccgttttactttccaccgttttccatgtcactcttaccattttactttgcactatgcagtgtatgagggtcccaatttctctacatccttaccaatacttaattggcttttttgattgtagccatcctagtgggtgtgaagcggtttctcatggtggttttgatttgcatttccctcatgactaatgacactgagacagagtctttttcacatgctcattggtgattcgtctctcttctttggagaaatgtctgttcaagtcttttggctgttttttaattgggttgcttgtctttttgttgctgagttgtaaggatccttcatatgttctggacactagacccttatcaggtgtatgatttgctataattttttcccattctatgggtgtttttttttttattctataatgccctttgcacaaaagattttaattttgatgcagtccaaattatcttttttctttttttgatattgtgcttatatgtaagactgtttgccaaacaccaagtcatgacatttttctcctgtgttttttcttctaagagttttatggatttagctcctaatacttgggtctttcatccattttgagttaattttcatatatggggtgatgtaaagattttgttttgtttttatttttttgtagagacagtctcactatgttgcccaggccgatctcaaactcttggcctcaagcgatcctccctcctcggtcttccaaagtgttgggattacaggcgtgggccactgcatagtgcctggccaggttttgtttggttttgatcattatcttttctgtcaggatgaagacattttggcattaaccgggaaggaggttgaagggcagtggtagttgggagttctgaaagtactatttcaaatctgtttaacaaatgcgtatacattgcttcttctgtgcaaagcattgtgcctgcatgggcccttggatggtagtgctagagaaataggtgtcccttgatatcctgggggtggaagcccacaaacagagaggtgaataaatagcatgtcaagtggtgatgaggcaggaaaggggatagagaccccctggggggcatgtgtggaggggaagcgtttctcactttgcattatcagctgagacctgggggagtggagatgcaaaggccctgaggtgggagtgagccaggatgtcagtgtggctccagctgagagaacaggagaggggttggttggacttgggggacgggcacaggggtggctggattatggtcaggccagcaggaccttctggccagggctttgcttccgtattattaagtatcatgttttaccaaagaagcactgatacagaccccccactcccccacttcatggcacagctgagcttagctgttgcccagaggttggtgtgggtgtctatacacagactcctcccacccctgaggggaagagttccatttgcaaggtagagggtagaagtaggatttctgtcccagcccttacagctgtgcaggaacctgctgcaaggattgtttgtgggtagacccacgggctggggctgcgttgagagcagatagtttgtttcatcatagaagtaggtttccctgctggctgtgatcctccctgtggctctgtgatgctgcaggatgcttgtagggaggagcttgaggaagggcgcctgggcagggcctccagcccacagcgtcaccacgttgctgggtgccctgatgaaaatggcaacagatgaatttttggttccctcactttccacttgacatttccttccaggaactgagaaggcttttctggcccttggaattttctgtgccagacctccctgccgtttccagtctcaggccttgatggagctggtggtcagggccacagcttcgcctggctcagccctgagagactacagccctggaagggttaaggcctcccattttgtgatgtgacgcctgatgggcacgtagcagatggcatggaaatggcaggcgtaacccttcgtaggccacgtaggctcacggtccaggaggcatctgggaggggacagagagccaggcccttcccacagaaggggagcatggccagccctcacagtgacgtcctacagctgggactctggtccccatttacctgtggaggtttaagactgcccggactcccccttcacaggcggcacctttgtttctatgtcgtgtgttccttgggcagcgtctgtttctctctctggggccgcagggttgggcttgggcacaggccctggccaacagcggcgcaggtgtggggccacttcaagcacggcctcaaatgagggcagtgttgggcactgaacagttctgagatgtcacacacagaaaccaagtcctgatctccagtgtgagcacagggagctattggtagttgtgttgtgttgtgttgtgtttttgagacggagtctctctctgtctcccaggctggagtgcagtggcacaatctcggcccactgcaacctccgcctgccgggttcaagcaattctcctgcctcagctttctgggtacctgggattacaggcgcccaccaccatgctggctaatttttaaattttttttgtagagatggggtttcaccacgttggccaggctggtcttgaagtcctgatctcaaatgatccgcccgcctcagcctcctaaagtgcaccgcccctggcctagcagtagttttaaagacacttatttgctacctgtctttctcctcataataagcctgtgatcagtttaggtgtgctttttcctattgtctggtacaacttgggggtgaagacaggctttcatctcgtgttacccggaagggccctcaagctgagacacagggccgatatacagaagcagctaattgtgatccttgtggggctctttcatggccagtgtgtggacactatcgtcccctggttttgggagttttcaggcaatcatctgtgtctctggaagatggcataatccctacaccatcttccctgattaagaactatgcttctccagtttttttcccccagatgacaccagagagggagtttggggtctggggacctgtctgtcccaggctggccctgcacaatagcgtggtgagtctgagtggtgggcacaccatgggagggctgttggctattgggatcagtgatctattttctagagacaacttatgcccaaaacagctttgctctgcacagggtgctggagtgagaggctaccagagctgctctccactgtgcaggcctagtgtgagttacattaggaatttgcagaccatctagatgttatttatttttagagacagggtccaggcggtttcaaactcctgggctcaagcactcctcctgctttggcctccctagtagctggaactacatgcacacatgccacgagacctggaaggttttatttttaaaacgttgatggttacttgggtatatattaatatacctgggtatgtttctgtgatgttttgctctccaggtttactttgttaaatgtatcaaaaaaaaaaaaaaaaaatccagcctgggcaacatggttgaaactctgtctctacaaaaattagcccagtatggtggtgcccacctgtgacctcgggaggctaaggtgggaggattgcttcagcccaggaggtcgaagctacagtaagctgtagtcatgccactgcactccatcctgagcaagagagtgagatcctgtctaaaaaacttaataaattgattttaaaaaatattttggaggcatcatttacaagtcctctacctgaaacacatgagattgtaagtgcatttatttgtaaatgggaaagccagaggtgccttttctttttacttccttcattgttttatttatttatcttatattaaaaggtttttttgtagagtcagggtcttgctatgttgcccaggctggtcttgagctcttgtcctcaagagatcctcttgccttgaccttccaaagtgctgggattaacaggcatgagccactgcacctggtccctttcatttttaattacctgcatttctgagtagctctagaaccaagaactagagatgatgggatggatgtcctggtcgttggtcagattccgcccactgtttggtgatgggaaccagcttatattcgtgggtcattagcatttcagatgaagtgctggcaagggaccctgccattcagcagcacagtgctgggcacacctgggttgtcacatgtgccctgttaggaggcggtagatgcccctctccctctgtcagagctgagcatggcacttgtaaatagcgtcttcctggaagtgctgggtagggaacacctgtgggggctgttgctcaccccctcttcagggaacgctggtgctcatatttatgtatttggtggcctgaggggaggtactacttcacttgaattggatgtgtgctgctcatgtctttttggagtgtgttctgtgccttttgacagctttcagctttctcctcctcttcaggacctgttaaaggtttcagccctcctctcacaggctagggggcggtcaggatccccgtaccacaaggtgctggggggtatgtgggggctttttcttcatcgtgttcaggtgaatacaagtgtggcctctgtactgggatgctttctttcaccaagcaacctcattacattaaaaaaaaaaaaaaaaaaactctttttttttgtttgttttgtttgagacggagttttgctcttgtctcccaggctggagtacagtggcatgatctcggctcactacaacctccgcctcccggtttcaagcaattcccctgcctcagcctcccgagtagctgggattacaggcgcccgccactatgcccagctaattttttgtatttttagtagagacggggtttcaccatgttggccaggctggtcttgaacttctgaccatgtgatccgcctgcctcagcctcccaaaatgctgatattataggcgtgagccaccgcacccggccgagattcaaacttttaaaaagtggggtgggcgtggtggcttactcctgtaatcccagcaccttgtgagtctgaggcagccggatcatgagatcaggagattgagaccatcctggccaacacggtgaaaccccctctctagtaaaatacaaaaaaaaaaaaaattagccgtttgtggtggtgcgtgcctgtaatcccagctacttgggaggctgaggcaggggaatcacttgaacccaggaggcggatattgcagtgagccgagatcacgccactgcactccagctggatgacagccaggtgggctgtgaattagaaggggtgtcccaggcactgatcaggctcctcgtgctgcagaagtttccttctgagttcacgcattgtccagatgtgcagcagtcaacaaatcagttattgtggcttctctggaagctgacattaccatgtttttggcacgaagtagaaccaacacgcaaggttgcagtgccagtgagttgaggacgttctgtggctctatccagctaggtgagaaattgcagggctgaggaagtagtgtgggttgaagtgaagtaggcgggtgggaatgcgtgtgagactcagcagggctctgggctccttcacatgctctacaacttggtgattccggcccttgtgtctgaaaaccatactttgtggttttccatattcttgagacaagtagatcagtagctgtgtggacgctgattgctcttgagaactactgttcttttgttcagaattaaatgcagaagaaagactttttttcttcttacttttagagacagggtcttgcccctttgcccaggctgcagtgcagtggtgcgatcattgcagccttgaacccatggactcaagtgagcctccctccttggcctcccaaagtgctgggattataggcgtgagccactgctcctggccagaaagatgttttctgagacaattgagcaagactcagaagtaggaggaggggatgaaaactgtgcatgcgtatgagtgtgagtatatacgtgtgtgttgttcaggattgctctgtgtttaactagtgtatactttgcaggggaaggaggtgtctgtctgctgtcccactgtttcctttgtctgtcttctgcctttcctacagggtcagatgctcttacttcatgggcgccatgtgttccttgtccccttcccagtcttcttgttgcccttggcttccctggatcccacagcccaggtggggccaaggagtccctgctcaggcactgagagccttgctgtggctgtcagaggttgatggggagactgcccatcttgtgggaagcctttgtaacagtgacttggcaccttcaacaggacggaagaatgtgttagttccgtctcctgtttttgtaaaatggttgtccacctgttgaactgcatcagcctctcaaccaggcagaaggcttagagaatccatgtcagcccccaagtccagggagccccagtgtgagctggacaggacatagattgcccccaggcctgggggggtgaagtgacgtgcagaattgaaggaccaaggcagggagtggcagtaggcaggacaggtcctggtggttctgctgaatccctgggctggggctgggctgaggagctaaagccacaggcaaaatgtaccacacgcagacctttagccacccacagtaactttgttttcggaccttgattcattctgtgggacaggacatgatataggttacctgcctgtccagatcctgccccagagtgggacagtcgtgtatggcagagcattagctgggagaggtcacactagctgggtgtggaccttgtcctcctgtgcgtcccctcaaaaccaggtaatgtgtcctcaggatttccctggcacaaacgacctcgctctccctcagtcctcaaaggtgatggccagtcctggttacccgggaagcccgtgccctgtgactcccttcctgccactgggcatccctgtagcccccattcctccagcaatcagcctcagtggtgtgtttggttcacaccttgtgcttgcactgtgactgaaacctcccctcctcagcgaggcttctcctgggcccccaggctgggcttatgcccctcaggtccttctcagccctgtgcttttccttagggctttggtgtgattctcgggcacctgtgcttagggagtgcttgtttctgtaactgggttaaagtttcatccactgcagcaattgagtttatagcatgtaatttccttctaccagggacctatttatcttgagtgttctaagtgtgggcttttgggacagtataaaattgaccctgtagcaagctgtcttgtctgcacatagcactttttgaaactaaatttccttctgacttgtcaaaagagttaaccttgagtccttgctctggatttaatttacacgttcgagtctgtccgctgtgccccccacatacaaggtcttgctccgttgcccaggctggagtgtagtggcacaatcacagctcactgcagccttgacctcctggattcaagcagtccttccacctcagcttcctgcgtagctgagaccacaggcgtgtaccaccacaactggctattttttaatttttttaaaattttttttttttttgagacggagtcttgctccgtcgcccaggctggagcgcagtggagcaatctcagctcactgcaacctccacctcctgggttcaagcagttctcccgagtagctgggattacaggtgcccgccaccacacctggctaatttttgtatttttagtagagatggggtttcaccatcttggccaggctggtctcgagctcctggcctcgtgatccacccgtcttggcctcccaaagtgttgggattacaggcatgagccaccacacctggccaaattttttgtgtttttttttttttgtttattttttgtttttgttttgcttttgagacagagtttcgttcttgttgcccaggctggagtgcaatggcacaatcttggctcaccgcaacctctacttcctgggttcaagcagttctcctgcctcagcccctggagtagccgggagtataggtatgcgccaccacgcctggctaactttgtatttttagtagagacagggtttctccatgttggtcagctggtcttgaactcccgacctcaggtgatctgcccaccttggcctcccgaagtgctgggattacaggcatgagccaccacacccggcttaaaaaatttttatcagaaggccaggtgcagtggctcactgcctgtaatcccagcactttgggaggccgaggtgggtggatcacctgagctcaggagttcgagaccagcctgggcaacatggtgaaatcccatctgttccaaaaatacaaaaaattagctgggtgtgttggcacccacctgtggtcccagctactcaggaggctgaggtaggaagatcgcttgaacctgggaggcggaggttgcagtgagctgagatggagacattgcccccagcctgggtgacagagtgagaccctgtctcaaaaaaaaaaaaaaatttattggagacgaagtctccctttgttgcccaggctcatcttgaattcctaggctgtagtgatcctccctccttggcctcccaaagagttgggattacaggtgtgagccactgtgcccccccccacccccttaggtttctgtttttgaaacctacttttctctgtagtccattctgctataaggcttattttggaaaagcagatttgttccaacacaattgatgtgttagaggaccgtcgaggtgtaacacaaatgttgcgatggttgcgtgtggttttgttcaggagaaacactaggctagggattggaaaactatggcccacaaggtggtggcctgttttggtaaatagagtttaattcgcagacacgcccattcaggtatgtacagttgggcctccatatccttgtgttttgtgtctttgagttctaccaaccgtggattgaaaatatttggggtaagccaggcatggtggtatgtgcttgtaattctagctacttgggaggctgaggcaggaggatctcttgagcccaggagcttgagaccagcctgggcaatacagtgggaccccatctcttaaaaaaatttttttgggggctgggcacggtgactcacacctgtaatcctagcactttgggaagccgaggcaggtggattgcctgagttcaggagttcgagaccagcctgggcaacacagtgaaaccccgtctctactaaaatacaaaaagttagccaggcgtggtggcatgtgcctgtagtcccacttactcgggaggccgaggcaggagaattgcttgaaccccagaggcagaggttgcagtgagctgagattgtgccgcgccactccactccagcctgggtgacagagcaagactctgggtcttaaaaaaaaaattttttttgaaggaaaataatggaaaaaacaatacaacataaaataatacaaataaaactatagtataacagctgtttatgtagcatttacattttatggagtattataagtaatctagaggtgactcactaaagcatatggaaggatgtacgtaggttgtatgctaatactacaccattttatatctgggattgagcatctgggaattttggcatcccgggagttcctggaaataatcctccaagggtctggagggacagctgtcctgtcagaaccacagagctgagcattcctgacagagactaaatggcccgcagagccaaaattatttactgtgtagcattttaagaaaaagtttactggccaggcgtggtggcttacgcctgtaatcccagcactttgggaggctgaggcaggcggatcacgaggtcaggagatcgagaccatcctggctaacacgatgaaacaccatctctactaaaaatacaaaaacaaaattagccgggcatggtggtgggcgcctgtagtcccagctactcgggaggctgaggcaggagaatggagtgaacacgggaggcagagtttgcagtgagccgagatcgcgccactgcactccagcctgagcgacacagcgagactccatctcaaaaaaaaaaaaaaaaaagagagaaaaagtttgccaactcttgcattaggtgaatctagaaaactgttaccagtttaatatagtagagcacctgtgagtacatgaaataaaactgcccacacctcagacatgctccaagtcccctcggggtcccgcatgttatgggccacaccctatccctttccggggtcagacagcctccctccagcagaaatggcagcccacccatgctcacggcaagcagtaagttttccccgaggtgagggtcagacttgcaacatttgtatatttcttagccactgagcatgtgtgtagctgtgctgcccatatatccacatgtgtcattgcttgggctcctatcttacgtcatagatgaagttttggagtactgtgtccctaacccttatgtccataagccctgtgtttttatcacatgggtttgcatcccgcagtgtttttaggagtgctgcctctgttgcgctacagcagaacttaaccatactttgaaggcaaaggcaaacaccaaaaggtttgctctcattcgtgacagtaaagtcgtaatcacttaatatctcatctggacctcttggtgtgagagggcaaggtcaagcccaaattgtacaggtccagtgctccccatgtcctttggaatcttcaggtctgactctttgagtggttgatggggccttctgatggctgactgggtacttttgtgccttggtttccccacctgcaaaaaggcggctgatgagagtatttaccttacaggtggttgtggggtagatgctcaatcagtgttgggtgttttgcacttaaaaattagaagatccccatgcttctattaattacaaaggagcaacagatttggatgaaaccctgaggatcccagagctgaaagtgagtttgaagtgtccgatccagtccttcaactcagagcactcctatctgtgacacctctgcccacgcatccagtatgtgcagcacacctgctctgtgactgacactcttgcagaagtggggccacttcagggacatggacaaggtgttgtacctgctgtcacagagcctgttatctggtgagtgattgggacattctgagggctcataccttctggctgcaggttcttcccaggggcctcccagagcttcttccatagccccaggcagggcaagtctagattcagtcttgcctggagacatctgaggatggctgttccatcctcctcctcacatgtatgcagctctcctttgagccccacctgtgcctgtcacttcaggtgaaagcagtgtaaacatgattaacaaggccaggctcggtggctcacgcctgtaatcctagcactttgggaggccgaggcgggcggatcacgaggtcaggagatcgagaccatcctggctaacacggtgaaaccctgtctctactaaaaaatacaaaaaattagccgggcgtggtgatgggcgcctgtagtcccagctgctggggaggctgaggcaggagaatggtgtgaacccgggaggcggagcttgcagtgagccgagatcatgccactgcactccagcctgggcaacagactgagactgtgtctcaaaaaaaaaaaaaaagattaacaaaaggccccttgcacactgtggaaggcttatcagagtggccacctagacagaggcatggtagcctgagttcagacctagcctggactttcacccagccagacttcagttgtgcctgtaccttgtgggatgacacatgcccgtctccaactcatgcaggctctcagtgagaggtagttggctccagccagcttgcacctccccactgctggtcttatcctaggaccactgcagggagacgatctctcagtttggggtctttgaaggctcagggagctcctagccagctgactaggctggggtccatcctgataacatgagagagagaagatgtctgtatctctggtgtgtctttacttttcaggccaccaagggttaagaacccagcgtcagccagtgagtagtagacatctgttctccttttgagaaagcctgtagttcaggactcaccacggctttcccttccttggcctgaaaccctccctgctcagctgcttggcgcatgctgttcccctgcctggaacgtctcgcctaattccttttcctgccctggcctcagtctgggagacgccatctcagtccccatgtcttggagttttaaatgaaagcactttacttgtttgctcctctttgccctgtagggcaaccctgggaatcacatgcttcatgagtctaatttacagaaacgtaggcgtaactcagcagtgcataccaagcccatactgtttgctctacactgaaaatgaagatgaatggtgaaaaaaagtttctgccattgagagcttaacattgagttgcagtgagagatgaagctcctgagtggcacggagattgttgccagggctctggtgaggtacgctgtggcctggtggttgtggccactcagggaggcttgtggcctatatagaaggcgggctgtgggaatgagctggggggtttgggttgactgtttagaatttgagagtctctagcatatggcacagaaggtagatgatttaagctgcgtggacatcttcgataaacactggaagaatgggcagtggtatcctctctcggcccactgaagcttctgtgtccatcttgtgtccttagtcctatgcgttggagtattggaggagccagcttccccctctctccagagcttctcaccctagggagcctccttcctcctcgcctggatgaggtactgtctttctttgttagtttctttctttccttttttctttaagaaacatggcctcactatgttgcccagcctggactcatacacctgggctcaagtgatgctcctgccttggtctcctgagtagctgggactacaggcatgtgccactgtgcctggcttcacacttgtgcttttgattctcatccttagcaggtggggctgttgttttatctggttttcttttttaatccttgctttctttgaatacaggactgattcatagtcactgttaaagaattcaagcaatacagaaatgtttactatagtaagtgaaagtttcttaataatctactcttcagagattactaccactgattttggtccagttcctttcagttttgattttagtgaagttactttcagttttttccctatatacaccttttttttttttttaaaccatgtaaatggtactatgctattctgcaacttttctcccacagttctttccatttttcttcacatagcattgtctgtgaagtagggatgggaaaactgaggctcagctcaagcatcacttgagcccaggtgttttgagtccagcctgggcaacatagtgagaccttgttcttaaagaaaaaagtttgggttgactgtttagaatttgagagtctctatctagcatgtggcacagagggtagataatttaagctgcatggacatctttgataaacactgtggaagaaggggcagtggcatcctctcttggcccactgaagcttctgtgtccatcttgtgtccttggtcctgtggttgattgacagacctctcccctggcccatggccagccagcgtgtgtgtgatggagctgagaccaagtctctgttccctgctgtgtctagttgtaggagctgactgcttggaacacctttctgtctctcaagttaagttgtatctctcgtacttggccttaatgaagtttgacattgagaagtccagagctgctgtttccggtgtggcttccttccggaatgagtcctagtcactgttactcagagatgtgcgtcaggaagtggctcgggccacagttctgagcagatggaggtgtctgttctgcatgggaaagaagtatgcttgtcaggcaggctctgccaatgccaaaacttggcccacctattctctccttaccccctcaacaggtccttctgggccacaacaaggtaccctggtttgactcttaggaagtgggagagccactgaagggggtacagatccaggatgtggctttgggagcttcctcgggctatgctgccgggaggagagtagacaggggttctgggtccagaggcccatctgtgctgtgcatcaatctgtgtgaagggcagggccacaggggcgctctggaggtgggcacctgggcgcaggcttgctgcagctgtgtgcctacagggtccttgtgtcttgagtgttgggcgcagctcacagctagcgaggctagcacctggaccccgttgtcatcatctgactcagcactggttgcttcatgggcccttcttccttcctgataggaagaggtgccctgaggtgccctgtgcctcctgaggacagtggctgcccccaggttcagggctctgctcctcagcatctccgtggggctcatcgtgggcctcgcactcagcacatccgaactgtagcccaaccttccttcctcaaatctgctcctccccatctcagaaaagccagccccactggtccagttgctcaggcaaaaacaagtgaaagaaagcaaccccctccggagtgccccaactcccctctgctctgtccccttccccagtgtagctgcaccataggaaccgctcccctgccctgcagtcctccagccaggtgatcctttagagcaagccagattcctcccctccggcctgggccagtgcttcccccagcacatgtctccgctcaggccctgtctccttcagggctggcttccggtgccgcccgttccacccagcccccgtccctctgtgtgctctgactgccccgtgctctgcctcgtgtccccacagcaccgtcaccaacaccctctgtcatttcgctcgttttccagcatgggggtggatggtgttccctctgtcttgttcaccactgagtccccagcccacagtggaggctcggtgagctgctgtcgggtgaggaggcagaaagacgcctaaaatccaccgttaagagcatcagccctgctgctcccgccagtgctttaacccacttactgcgaagcctcactttcttcctgtctgaaataagggtgttactatgggtatgttagtgatgggtgccacagatggcattttatggtagagttagtattagcattgtgatctcaggggtttggttttatgatttgtgtcatgtacttaatttctcttttaattatcaagagatgcgtactggcctggtgtgccagaagtgtgctgggtgccttctgtttgtcccccaagtcctctttaagagttctggttcctgccacagcatcagtcagccttttggaattgttctagaacatgttttctgcctgaggctctcaggccagttggatggtggcattttacgaaaataaagcagcattcctatctgccctaaagcccatggaggtgctcccggtcagagctgcgctgtacctgtgtggggtctctagtgtggctggaacctgtcctttttggcccctagttgaggaagagctgggctacgcccccaccacctgccagcccagtgtgtgcgggacgtatcagaggagaccgatgcccactcagccttgctggtgctgctcatctgtgctggcttgcagtccggcctggggtgtttggagagagtgaggaggagggtgaggctgaccttcaaccttgtgtctcaggcagccctggcagcctcagtgctctcctctttcaaatgggcacactgctgttgggatctgtctgtgcaggcagcagccggcagaggatctcagcccccaggacggggctactctccatgcactggcagctcccgcacaacccttgcctggaacttccgccaccggagctgccttcccctcactctcccctgtcactgggaattttgaaatgaatcctcatttgccagtcagggtgacctagcctcttcacctacttttaggaagtgttctaatgtaccccccactgctctttgcaggagtcatctgtcgcgctttcttcttcctgacaactttgctcctgggtctgtgcttgctgtgcggtggccgccagccctgttgtgctgggggcactagtcccgcttgcttcgaggagggaggagccactccttactggcacctgccctccccaggagcaagtgtcctgtggtggccgaggattggccagtagcaggccctgcgtcattggtcttggcagtggaggaggctcctgccaaaggagccccctgcactcgggggctggccccaccccctccagctgtgcctgtccttcctgaggtgggggaggggtgccgcagggccccgccccgcagtggcctgcctctgggaggcacaggcatagggcaggcgggcgctgtgaggccagccgtcagtgccgggcctgggattggcagagttccaggccttaggcttcatagtgagctgctgtgcaccttgagtacacgccagccagccctctgctgaggaccctgacctgctaccacaacagggggcccaacaagagaggtctctggggctggagggagcagctctgctgggcacctgaggccctgctccatcctgcatctctcagaacctctgggtagcctctggtcctataccagtgagaacgaagtgaggccacacaggcacggcccccctgatctggctgtcagttccaccttgtccatgtgggctggagcagcttcgagaactcattcagggtcttgggttcaaatgggcttcatggaactgagcccagagcttacagggtgggaggctgtgctgggaggggccctgcctggctggaacaggggcagagtggggagcatgggggtttctttgagtcacagggaagggtgctatgtcctggaggtggaggtgcattctccctgtccacctggggacctcatccccaacagtagttataaggccagactgggaagcttcatccgtagagtggggcccttacttgtccgaggtcctggcctcccctcatctctcacctaaacaggcttttccctgccctgggcctgggagtgcacatacctgctgtctaaggcagtgcttgaaggagaaatgtcccacccctcccacagtgagggaaatgagaggaggggacccacactctgagggcagtgacttatctgtggtctcatgggaggcaagacagacaacctgttagtgagcagttcagatggggtttatgggcaaggcatgtcggaggaaggaaggacagagaccatagaacttcagggctgagagggacaccgtagcattcctcacctcccccagagaagtgaggccatgacctccacattcgacctctacctgggctccattccacggaggagctgaggggcagctgagcaggagcgggggcgggggtggacagggtggccgggggcagcggaggccgcacagttggtgtgggataggtggtaggtgcaggctgggatgccagaggggctggggacaggtggaggcaagtctgaaaacctgtgcccttgagattcggagtctccctgcctcagcctggtcatgttaagggtcagccatggcacctgggtggtggtgagacagggtagggagcacagagctgctctgggcctgtgtgaagcaccagggatttcctggccttgaggagaccccagtgtttcaagccggtgcccgggtgccctggctggaccacactggcacaacacgcatgtagacggcctgctttccctctggctccaggagcgtgaagcagctgtctctttctttcctttcagtttgagtgcatgagggggcacatttgggcagggccttgcgctattgctcatttgtgaaattggctcctttaaggaagctgcagatgagtcagctctggagtgcgtcccatggatggcgacaggacccctgtgttgccttgtgctgcccccagcttccagacggtctgcctggctctacctgggacaggcttccccagggtgtttgccagtgaggaaactaaggctctggcaagatgagtgccctgcctgtgaggacacagataggaccagagggcttcagcatagagcatgccacaggtgtgaattggggttctctgtggggcccaagtgggcaccaactgtcccatggaaaactgtgacacttcgggaattccactagagctcagctgctaaatttctcttttgtcctctggtaaacactgggatgcttttttaagaacctgactctctctgtctcaattcctgtgccctgtcctgttgggacgtcgaggccgggattagagcagcccctttaagagtgccagtgtcccagaccctgctgtggaatgccagccgcctccctgcagacagacatcgctgtgctgtcgtcctgtctccgtgagggttaacaacacttcagcctgttgtctggaaccggttcagactggttttctggaaagtgctttgtctctccgactgaatcctgggaagggtcatgtggagccagtgatgtcatgggatcaaaaactgactcagctgtttttttcttctttttctttcttctttaaatcaagatatgtgtgtgctgcaggtacagggcagtggcacgttgatgggccaggcctcactctactcaaagtgtacctcactggcaaccaaagggttaaatgtgatccccagtccccactccccagaggtgagcagggagtgaggagacctcccttccctgaaggggagaagctggggttaactcgagtcaccacagcatagggctagtcccaggccccgaccctgctcctggaacagtgcagtcaccgccctcctggattccagacattgcaggtgctgaaaatcccaaaggcaggtagttgagatctagaacaacttttcctctgtttgctgttgagcctttccttgctgataagcagccaccttccactgctcctgttcagcaccctgctgcctctggcccccaacagggcagggtgtagtttggctccaccaatgttcagccacacagtggaggctggggacacccccctcctgcctagccttcctcaaggcagtgatgaaatgtcctggggatgcttttctgggccctgcgtttgttgtacattcttttgccatccttcccatagggaggaaaacactgaaagcaacactgaaaagtctccaagaaggtggcaccttcattgcacccagttaaaatgttgtgtcttctcctccctcccaagttcagaatgaccgaagaagcatgccgaacacggagtcagaaacgagcgcttgaacgggacccaacagaggacgatgtggagagcaagaaaataaaaatggagagaggattgttggcttcagatttaaacactgacggagacatgagggtgacacctgagccgggagcaggtccaacccaaggattgctgagggcaacagaggccacggccatggccatgggcagaggcgaagggctggtgggcgatgggcccgtggacatgcgcacctcacacaggtgagtgggaggagccagcgggaggggctggaacctggagacaagcccagtgtgcccaggttggggctggccacactccaggcctgttggtaacagcttggcggggttgtggagagggctgtaggctcagctcgggcatcacccaccactggcagctgtgctgttgtggccattccagggccccaggtcccaactgcaagtggcacagagtgtgggtctcacaggagaaggagtggcacattccatcagctcccctgccatcagtaggcctttgccacccacgcacctgctgtctgtccaactcggtgcttttggtttgtagggacacttgagttattcatttggttatgcttccctgcttttcagatctagaggtcagagggccaggaatgctacacctaccttggtcacttggctagggatagagttgggagcccagcccagggcaccctcctcggagcgggtacgggatgctcactcgactccatgttcacttggtgctggtctttggcttgctctgttggtttgtccttagtcaacactgattacttcaagagtgactttcctcatattcaccttttatgagtctcttaaggtaaaagcttgaaataaaaataagacccaatctaccacctatttcttgacttcaaaaccttcctttctctctgtaaagacaaattcagacccagcacctgctcttgcatcacccctccccttggagctctccagaatgttcatgcccagacacccactgagggctgtggtgtggccacagcttcccggctggccctctgacaaactcctctgtggcccgttgctctctctcctcaccgcccactggagtcttctccctgtggagggcctgtctctccacgcctgttcataagggacagctggtggctcctcaccttcccgtgtcagctaaccccacaggatgaccccagcctgcagtcttatgtcaaattcgtttttggaacccaaactgttgggatcctgaggacttcagagatcatctggtgttcacagcgtttaaaatgggaagataaatgggaaaacccaagcctgctcctgttgacaaagcctcctagtctgaggaaatatactttgtagtcctgctgtccaaagagggcttttctgtctgactctgctgtctgcagtccccattctaaaaccaaggtcctcttctaaagttccagaaataaaactataggtccaagtctccttttcctttctctatgttttcagccagagaccagtccatgacagctcagcaggggtgagcagtgaggggctggtgtggagtcagggcaggaagaggaggagtccatgttcatgggaatctgcagtccatgtgcatggggtcccttgtgcattcctgggttgctgacatgcattttctcctgtaatcaccatgttcccctgcagggtaggtcagtggattgtgagggagaagttaagtgttaaagaaactcagagttcagctgggcgcggtgactcacgcctgtaatcccagcactttagggggccgaggcgggtggatcacaaggtcaggagattgagaccatcctggctaacacggtgaaaccccatctctactaaaaatacaaaaaaattagctgggtgtggtggcgggtgcctgtagtcccagtgacttgggaggctgaggcaggagaatggtgtgaacctgggaggcggagcttgcaatgagccgagatcgcgccactgtacttcagcctggggaaagagtgagactctgtctcaaaaaacaaaaaaatattgctagcacctctgaagccccctcatgcttgcttgctgccactgtcttccaagggtaatcactttcttgacaatatggattagtttttcctgctttggtactttaaataagtgggattatatactatgtaccttttatcttcctgctttcactcagcattgtgagatttacccatattgttgtgcataccagtagttaatccattttcattgctgtatagtattttgtttatagagtttctatttgggtatttttcaaaactacctttttttctttcatgctaacttattaccatcttatgaccgaatctgggcatattgaaagctagaggcagtttctgatggcttctaggagagagaatttcctttttctttagtggctggtgaattggaatcatcaagaaatatatatgtttgcatgtgtgtgtatagtgtacatattgctatgttggatgatttggagcatgcagaggcagatacagtagtagaatcagctttctgcctccatcttttactccgctccctgtcgctctttaactcagcagtttttctctctcagtctcccaacttgtgtgagtgttttatattctacataaattgagggtggagggcaacttctggttgtgttgaatgaggagattggcagaattgacaaaagcaaaatgaaacaatctcagcattctggaaaaattgagcaggggcatacaacaatctgagaagtatttatgcctgtaactgctgaatttcaggtgagaacagtgagactgtatggcatttggcctggagctattcctatgccctctcccatctgtttggtaaagaggttctgtccagccactgtcagctttgaggaccaacagcttcgctgtgtgggtgaaaaggaggactgttcattttagagtggtagcaaccctgcctgtggtcttgtagatgagagtgacagtcttggagatgggcaagtggggagacacagcggctctgttttagcccaaggttggggcaagatagaaaaactatttgaagaaataatgggcaaaaacatacttgaggagaaactcatccaggaatcccaacaaaccctaaatagcataagtacaaagagatcttgacctagatacatcatagtcaaactgtagaaagccaaagaaaagaagaaaatcttgaaagtagcaaaagaaaaacaactcagcacatctggggagcattaataagatgaacagctgacttctgactcgagacaatggaaacaaaaaggagttgaatgatgttaaaagtatccaaagaagaaaactgccaacccagaattctataccagtaaaaacagtccttcaaaaatgaaagcaaaaaagacattgtcaggtaaacaagactgaaggaatccattgctggtagacctgccagttcttcagcctgaaaataaatgacacgttggcagcttgagtctatgagaagaaataaagaacactggaaatggtaaatgcatgggttaactggaaagacttaactagttctgcagtctggaagccaaccaaaggctttgaatgatttgttgggtttataatatccacagataaaatatatgtcatattagtacaaaagatggggaattaaatggagcaatattggagcaaaatttctgtatcttactggaatcaagttagcatcagtcttatatagattgtgattaagatgcttactgtaatgcctagagcagctctgaacaaaataactttaaaatatagttttttaaaaaaatcagggctgggcacagtggctgactcctgtaattccagcactttgggaggctgaggcaggtggatcacaaggtcaggagaccaagaccatcctggctaacgcagtgaaaccccgtctctactaaaaatacaaaaaaattagcctggcatggtggtgggcacctgtagtcccagctacttgggaggctgaggcaggaaaatggtgtgaacctgggaggcggagcttgcagtgagccaagatcgcgccactgcactccaacctggatgaaagaacgagactccatctcaaaaaaaaagaaaaaaagatcatcagaattaaagttatacactaaaaaatatttaacacgaaagaaggcagtttctttattcactgagaaataaaggaacaaacaagaggacatgtagaaaacaaaatggcaaatgtcaatccagccatgtcaataatgcagtaactgtgaaggatctaaatacctcaatcaaaaggcaaggactatcagatagtgtaaagaagcaagattcaggctgggcgcagtggctcacgcctgtaatgccagcactttgggaggccaaagtgggcggatcacaaggtcaggagtttgatagcagcccctggccaatatggtgaaaccccgtctctactaaaaatacaaaaattagccaggcgtggtggcacgcacctatagtcccagctacttgggaggctgaggcaggagaatcacttgaatccgtgaagcggaggttgcagtaagctgagatggtgccactgcactccagcctgggtgacagagctccgtctgtctcagaaaaaaaaaaaaagaagcaagattcagcttaattatatgttgtttataagtgacgccccttagattcaaggaataatacaaaaggatggaaaaagaggtaccataagtaaccgcttgagagctggagtaactgtattaataagagataaaagacactttaagaccaaaaaattactagagccaaactgcgactttatttttttttttgtttttttttttttgagacagagtctcactctgtcacccaggctggagtgcagtggcacgatctccacctcgtgggtttcagtgattctcctgcctcagcctcttgagtagctgagactacaggtgcccgccaccacgcccagctaattttttgtatttttagtagaggcagggtttcaccatgttggccaggctgatcttgaactcctgacctcgtgatccgcccgcctcaccctcccaaattgctgggattacaggcgtgagccactgtgcccagctgcgacatttcatatgatatttcaggaagacataacagtcagcagagcccccaaatacctgaaaacataaacttgataggattgatggaaattaatcagttatagttagagatttcaatatcccactctcaataattggtagaacatctagacaaaattggcaaggtatggaggacttgaagaacattattaactcacttagcctgacatctgtagaatacctggtgaatgcagaatacatcctcccaattgtaggtgaacgttctctgttgatcatacattggaccataaaacaaggctccagtatagctgtaaaaaacaaaaaaaaaaggaagtaacaagtgttgaggaggaagtgtagaaactggaattcctcatacattgctggtaggaatgtaaaatagcccagatagtttcttacagagttagttgtaaacttaccgtatgacttagcaatttatccaagagaaatgaaaatgtgtccacacagacaggtacacctgcagcagcatgattcatactggtcgaaaagtagaagcagggccaggcacagtggctcacgcctgtaatcccagcacattgggaggccgaggcaggcggatcacctgaggtcaagagtttgagaccagcctggccaacatggtgaaaccccgtctccactaaaaatacagaaatttgcctggtgtggtggcgtgcacctgtagtcccagctacgtgggaggctgaggagggagaattgtttgaacctgggaggcagaggttacagtgagccgagatcgtgccgctgtactccagcctggtgacagaacaagactgtctcaaaaaaaaaaaaaaaaaaagtggaagcaacccagtgtcccatggataaaacaaacctgctacctctatataccagattactgttcagctttataaactactcatgtgtgccataacatggctgaatctcagacttgccacgctaaggaggatacagcagatgcagggactacttgttgtatagtttcacttacagggcatgtccccccaaaaagcaaatttatttgagagatggaaagtgaccagtggttgactaggacagggctgggggtgggtgggagcagtgattaacaacacatgggcacgttttgggaagatggaaatattttaaaattgtatcgtggtgatgattgcacaaatttactgaaatcattgaatggtactcttacggtggctgaattttgcggtatgtaaagtatacctcaatatggatgttaaaaataaataattaaatgaaggttaaaatagtttggtttctgttgtggcatccataaatgtgcacacagaaaaacaaaacccgcagaggtagaagttgtgagtctgttggttttgtgaggccaatccaaaggtcgtgggcatgtgctgcccctatgccgagtctggactgtcagatgaggctggagctggcaggcagaggaggctgcttttggttctctgttttttggagttggtcttgcactgtcggccaggcaagagtgcagtggtgcagtcgtagctcactgcagccttgaacacctcggctcaagccactcaagtaggtgggaccatagatgcatgctactacacctggatggggtttttctgttgttctttttaaaaaattttttgtagagatggggtttattatgttccccagactggtcctgaactcctgatctcaagtgatcctcctgcctcagcctcccaaagtgctgggattatagatgagccacggcaccaggccggttctttctgttttgtttttgtgataagtagcagatccagtcctgcactttcctgtaggggagagtctctttctttcaaatggttgatcttcagaaataactggccacacccagatggaaatagcttgatttgttttcttttcttttttttttttgagatggagtttcgttcttgttgcccagactggagtgtggtggcgtggtctcagctcactgcaacctctgcctctcaggttcaagtgtttctcctgcctcagcctcctgagtagctgggattacaggtacttgccaccacgcccagctaatttttgtatttttagtagagacagggtttcaccatgtaggccaggctggtcttgaactcctgacctcaggtaatccacccacctcaacctccgaaagtgctgggattacaagtgtgagccactgtacccagccttgatttgtttttttttttggatggaagagcacgttgctcagtaaaaatgcggctcttctccaggggtcctgcaactgaaaggtaaggactgagggtccctcagtcaccttgggcctgcatggggtgagggaatgagaactctgtgaatggccacacctcactgaggatgtgtttgtatgtgccttttctgaagtgtcaactcttattggattgtcagtggtccaggaccagacctgctgtatgccaggtactatgctgatctctggtagagaggtaatcaagacaggatctgatttatgcagctatttttttggaagaccatgtcatgaaggaaagcgcagaggtcttggaaagaaggacttgccattgccgatgtggctcaccgtctccatttccttacttcacctgggaggagactgggctgtggcttccgtggtccatggattgggcagacttcaacacagcctaggtggatatctggcaagttgtccccgttagtggtgtgtggcgttcaggcagctcttgtgtcttgctcttctcttccccacctccccttgtaccatgagtggcttgtctgctgtgggagggggcagcacttggaccaaaggcctgccccatggtctggacggggcaggctgggatgtgtgttccttggccactttggggctcaaagtagcatctgtgctgttagatctgatcttggctttagttttttttggccttcagctccctggtcaagcacttgtggccagtgacagactgtaaaacacactggaaatgtagtctgtttactgggcctgcaaaaccagtcgcaattggtgacactggtgtccttgatgacaattagaatcattgccgttgtctttctttttagacttttgcagtcaccaagagggcggtggggtgacacatctgtgtcacttccctgcccagagaatgcactggctgatcatttgatattaagacaggttaggccacccaccacggtgagcatgcgtgcccatcattaaaatgcaggttaggccaggcgcggtggctcacgcctgtaatcccagcactttgggaggccgaggcgggcagatcacgaggtcaggagatcgagaccatcctggctaacatggtgaaaccccgtctctacttaaaaaaaaaaaaaaaaaaaaaattagccgggcgtagtggtgggcacctgtagtcccagcaacttgggtggctgaggcaggagaatggcgtgaactcgggaggtcaggcttgcagtgagcccagatcacaccactgcactccagcctgggcgacagagcgagactccgtctcaaaaaaacaaaaacaacacatattaacacccaagccttccaaaaccaaaaacaaatcagaaagtaatgtgatattgcttcttcctagacatccagccacccagttgtccagaacgtgggagtgtggacggctttgttttgttctgtgccaaaatggggccagctggaaaaaaggtgtgcatcacataatttttgcaagatgtctctgaggatcacggatagagtgagtccttcctgtttggacagatgctttttacagggaagggagaggagggtgaggtcgacactggaattgcccccaaccccgacaaccacgtgagcatggggctctcctggtgtgcccgagacagtgagttctgactcacgtgtgcacctgtgagtcaaaccctgaatttaggtcacaaactttatcacggcccagaaaccttaccatcccactccagaagggccctcacgcactcccagcccttcctgttttggtgcttcccctcatgagactggtcttgcctcttttccggttttccagggatgcactcacagagtcagtgctctttggggtccggcttccttctgagtgttttgggatttgcccctggtgtgtattggtgtgcctctgagtggtgtgcacagggcacttctcacttgtcagtagacatgtgtgcagcctccaatttgggcctggtgtgagcacccgctgctgtgcaaggtccctgcagattgtctgtttgtgggtacgagtcagcatttctcttggtaaacactcaggttaaactgcagggttacaaattgtgtgtgtggttagtcgttttagagaaacgactgggcttttcccccaaaatggtctgtgcttttcacactcacaggtgtggcagtccagcataccgtcttcacttgttgttctcagtctttatagttttagccactgggtccccagagaggttgaggtccagacttggcctacacgtgtggctctgtcttaagcccgtcacccttgtccctctttgatggaagcacgaggccaggcagaagagcccactgccccttgtgctagtcagtcacatagcggatgctcggacagttgctggtgccacagaacccctatcatcgttgtgttggctgcctgcatacgggtggaggggttgtcttcacagcgatgtgcagagctgagcttccaccccctgctctcaggactatgcctccccgcagctgctcccggcccgccggccggctgtctacaggaatgcacgtccttgaatgagatggacgatggactaatgtggcacagctgtcgacgtgagggctcaggaaagggctgggttctcatagcccagggacatggtttgtggccctcacactggctgcctcctacagccctcttggcagggattgaacccctaaatcccccatcggggtgccagagctttggaagtcccacagcaagaagccattttccctttgtgtgaccactggcctgtcccagagtcagggtccagacagggggctccggagcggggtactctgtgggcggctctctggagcccccccccctccactgccccagcccctccccagcacctgttgagggctggctgctgcctttcacttgctaattctctgtctgcttctgggcaacttccaggagaggctgggtggccccagggagtgccttcaccagctccgactagaaatccacagcctgcgggcatttcttagctcatgggaactgagaggtatgttcccttgggaatctgttttgtgctcccttccctgccttagccgctgcccctccaaacctcagtggccaccgtctgtctcctccttgttctctatgtcacccctttcctgcaggctcctcatccaatttccctttatctgggactctaatcccagaaatcgctgaaatgtgaggggtccacctgtacttctaagaatcgttagattatataggggcaccaggataacagactgccctgtttctaactccccaagtcctcagctcacatgagggccgtagcatgagccggcccggtgccaggtaaaagagcatcactgctggtcttcctgaacttcagcttctccaaggtgttgccagctccctgttgcctttagacgccctcctctggtcatggaggggactcggatccctaactttgaaatggggcttctctcttggacagtgcaggctctctggggatgttattatcctgtggtggctctgacagaaaaccagaggccacactttatatggacatcgaggtaatcaccagtaaatgtttggccttctctgtctgaactcttctcacacatctgtaagttgagcagatttgcagattaagcagacctcttccttctttttaaatgacttgctttctgttttgctgctgcggcttctgatatctcctcccagcatgtattcctgctgttgtcttatttgtcactcactgacaggcttctcttcctgtaactgatgtcccagctcctgtagcgggttatttaaatgtcccatccacagggacaagacggggagggtgtctgaccagcactccgctgtgcccactgaaactgggtttagctatgttgcttttcagtctgcagccagcttccctgccatgctgcaagcagttgcagtgaaaccaacctggaggctacggggcggcttctgagtgctccttaggccgagagccagtcctgtccctcatggtcccctaacctggtgaaggagtggagcgaagggcagtgggcgccaggccttgggggtctctgtgtgcagaacaggtagaaacagacggagtggatacctgggaacctgcaggggcatgtgtgatcccaggtgggacaggcaggcgtcacacccaggggggcagtgttttcccggttagcagaatatgcccctggaagaaaagaaaagcctacctggttagaagagatctttctgaggtttttcttctctctcttaagatgagcatatgaattataatttgtgagcctgagggggcagctggtggtagaaaaaagaacgtgggtgtctgacagcctggatcggccatgtactgaatctctgtgtggcctgggatagtctgcccccactttgtgaatgcctcttgtctcctctgtgaattgaggctccaccatagtgtaaagtcacagtgctgagaggaaggcagggtaacgcctgaagccaagctggatctgctgcctttggaaacactgagttacctgtggctgaggctcgggcagatgccaccgttctctctggagggtgggagacaagggaggggacgtctgatgggtggaaagatgggagacataccagatgttgctatgtgcctcccttgcttgggacctgtgccataggactgcggatttttagagcttatatctttaaaatagttgtgacgtcatcaaattgaaaagctttgggggttcatgcgactgagacttgatgccatgcagaattcctcaaggcagggccctgatagctttcgtacaaagagcattctaaagagagccatcagtccaggcctccaggagacttggcgtgtctgcaggcggtgtgggaagagtggtctgagggcactctctgggggactgcagcccagaaatcatggtgcaccgggtgcaggggtcagagtctgaaggtacacggtggtaggagcagagaccggaaaggtggtctgggatagattgttggatgcaggaagggtggaacatagagttgggactgggccttgggtttgggacccccctctggagaagggagagttgatgctctgagcctaggtggagcccaggatctctcaggcatttggacgggagagaggtggccaacttgctggagaaggaaggagattcctagtcccggagaccagcagtctaggggcagtggggcacaagattcagaatagcgtcctcacactgaggtcctgggtgacctggccagccatgttcctgtgtttgatccacagccatagggcgtcgcccgctttctgtgacttaggtaaacatagaggctgtacagttgccacataaggctgtaagaaccttaaggtgaccaaattttgttggctgatgattaaataggttttataagcaattatagtgtatctttggggtgaatcctattaaatttttagtacctctcacttttcaaaatacaactttggcagcaaaaagaaagttacatgggccatgatacatcagcaggacaggacccaggatcccagcctctgtactactgtcgaggctgccagagatgggaaatccttttcctgaagcactggcacctccccttttccatctgtgggccccagacagcagttggatttgtgggatatgtctgttgacatttactgtgttagaaaatttgaaaatactggccaggcgcagtggcttacgcctgtaatcccagcactttgggaggccgaggtgggcagatcacatgaggccaggagttcgagaccagcctgagcaacatggcaaatccccgttgctacaaaaaaagtagctgggtgtggtggcgcacttctgtaagcccagctacttgggaatctgaggcacaagcaccacttgaacccaggagacagaggttgcagtgagccgagatcgcaccactgcactccagcctcggcgacagagtgagactctgtctcaaaaaaaaaagaaaaaaaatttcagcctgggcaacatagcaaaagtgtctctactaaaaatccaaaaaaattgcagagtggtggcgcacacttgtagtcccagctattcgggaagctaaggtaggagaatcacctgggcctgggaggcagaggctgcagtcagttgagatggcaccactgtactccaggctggacaacctgagttgagaccttgtctcaaaaaaaaaaaacaaaaaaaaacctattattaattcatttaaagatgactatagtagacctgtgacatattagcataaataacttattattaaaaatctattttgcaaatctctttaatactcagcttactaagaaggcagctgctaggttcccgtggctatttctgtgtccatcctcttgcgttctttgtgagggtttgaagcatggtgaagaaaatgtaactagcatggagaagaggttggagagtggaggagcgtttccataggctttttggatcattgtgcgtttcctcctctaatgagaaaccaaaatccagagtggctagtctctactggtgagttggcccttagactctgaaacctcatcattgagctttttgtacatgggttacattaaaatccgtgggactcttttacactttgaacagaaaaatctgtttttaaaactaacttttaattttagaatagtcttagactcacagaaaagttgcaaagatcagtcctgcaaacctcatcccagtctccacattgttaacagactacagaacatgtgtcacaagtagtgagccagggtccatgtattattttaaccgagttcatactttattctgatttcctcagttttttccagctgtcctttttcccttacgttatatttaatccttgcgtctccctagattccttggactatgacagtttctcgtactttctttgttttgggttaccttgtcagttttgaggagcagaggtcaagtgttctgtagaatgtcagtgcattgggatttgtcagatgcttttctcacaggcaggtgatggatttgggggaggaagaccacagagggtgaagtgctcttctcgtcacatcatatcaaaggtactgctggtcttgaatgaacgatcgttttggtgaggtgccatttgtcaggtttttctactgtaaagttacccttccctccttcccctgctccaccatttccatactgtcctctttggaaggaagttactatgtgtggcccactcttttttttttttttttttttttttgagatggagtctcactgcgttacctaggctggagtgcaatggcatgatctcggctcactgcaacctctgcctcccaggttctagtgattctcctgccttagccttgtgagtagctgggattacaggcactttagagaaggggttgttcaccaagttggctaggctggtctcaaacttctggcctcctgtgatccacccgcctcggctcccaaagtgctaggattccaggtgtgagccaccgtgcctggcgacacagcctactcttgaggaatggggactcatgctcacctcttcaaaggtgaattgtctgcataaattatttgggattcttctgcctgacagttttatcttttcttcccctgaatgacattttactcacgtatgagtttgtaataccattgaatgttggaaaatagtagtttactgggttatagagacgtttcagatacacatatcatcatttagtgtcacaaaatcagatttgtcaatgtcaccacctatccgttgggaagttgttgagctcacagcaagtagcaaatataagttttccaaaattctgatttttgattaatggaagctcgtactttatcactggtaccagatacccttgggtgtttttcatgaagcaccaggctttgcatgaatgctcacgcgagcgtttctcttcatggcgccattccactgcagtatgcagcaggagggcttcttcctgtcgtactttgtcatgggataccacagagacactactcagaggttgacgtttaatcgcatttcatgactgccccccgaggtgagtggcgtccccttctgcagatgaagaaacttggcctcattgaggtttggtgaatgggccagtcgccccaacacctgcagaggtgcacccagccccctcagtggtcctcgtgggtcacttgtggccattctgcactgagcaactggagcaggtctgattgggttgtgggtgtacctagctggctagggggacaggtgcaagtgatggggatccagccacttgtgatgcagatgtttaaaagaggggcaggaggtttccaggcacagcgagcactttccattcattgagaaagtttgtggtcgtttcagaagcagtgtgtgtttcatgtttgtggctttcatgcacacaggtgacttctctctccctgtgtattggcgaggaagctggcatctctcccaggagatgccttcagttcatttgctgtagggagtccttcctccaccctgcttgaggagttctcaccatgttttctccctggaggaaagtgggcctagcatgggtgtagggaccagcatcaggaggggtgctgcgatcagtggccagggtttctcctcctctttgtcctttactctccccacaccaggccctcaggagcctggattcctgagctccacaaccatcctaccccttccagcaggctttggcccacttgcagtgtgagtgtccaccacctctgaggtttgtttctttccttttttaaaagacagggtcttgctctgtctcccaaactggaatgcagtggtacagtcatagctcactgtagcctccagctcctgggctcaagtgatccttctgcctcagtctcttgagtagctgggactacaggtgcttgccaccatgcccagctttttaatttttttagagacagggtctcactgtgttgcccaggctggtcttgaactccaaagctcaggtcatcctctcacctcagcctcccaaagcgctgggattgcaggcatgaaccatcgcacctggccatattttgtttctgaccatcccctgacttgtcttgtgatttgggtaagttatcatttcttgatagagtccgagggccacatctgtgtcctcacactgcctcctccttcacacctcagggacttagcttgtggatgctactggctgtccaggatccttcagccataaataaaggttcactattccaaaaatgacatagtggggctcagtggctcacgcctgttacagcactttgggaggctgaggtggaaggatcacctgatcccaagaagttcaagaccaagcctgggcaatacatagtagttcccatatctaccaataaataacaaattaattcgctgggtgtggtggctcgtgcctgtagtcccagctactcaggaggctgaggtgggaggatcgcttgagcccaggaagtcgaggctgtagtgagctgtgattgtaccattgcactccagcctggtttacagaatgagaccctgtctcaaaaaaaataaaatatgaccgagcgcggtggctcatgcctgtatctcagcactttgggaggccgaggtgggcagatcacttgagcccaggagtttgagaccagcctgaccaacgtggtgaaaccctgtctctactaaaaatacaaaaattagccaggtgtggtagtgggcgcctgtagtcccagttactggagagactgaggccggagaatcacttgaacctgggaggcagagtttgcagtgagccaagatcgcgccactgcactccatcctgggcaatagagggagacgcttgtctccaaataaagatatttgatgacctgaattagcagctgccagtcacatggggcctatcctctctaaccccacacctcctctttagggttcccccagggtcctggcacagtgaggggtccacacaggagctcaggtgctgtaggagcccaggttgtctgcaggtcctggtgtgtgaccttaggaagtcatgtggccctcccttaagattgttccctgtactgggaactgggggtaatgatggagctgtggagaggattatgtggaagggtgaattttggtggttggcctaggaatggccatcataaaggctcagcaggtgtttactgggtttttgaaacctgaaaagttagcctttcatttcttcgattgtagtcatttctaatgcatgtgtcttcctgtatttctaagcagaacgtgctggatttgatgtggcctcccccatggtgtcagctgctgacaagattgggctgcagtggcctctgtgggcgggtagaggctgctggcccacatgagcatggtactaaggtctcctaggcttgtctctactaccctcagccaagctattctgcacgcccccgagactggcccctgtcacagtgaggtcctctgggcctccctggctgggccctttgacttcaggggctgttgcgttcctagaaggcgttctggcagcgccggctggccgccccctggctgtgctgatgctgggggcgggcactgcatggggctcctctgctctagctggggacctgggactgctcccttctgtactggggaaaggagagcaggcagggatgggctcagaggtctgggccagccacacagactctctctctttttcctgagctctttagccagcactgtggcagtgctcaccataatggattcccagagcggtcgttggacctgaagtctccaggaagaatgatggctgagtttcaaaaatcccatcccagctgctcacctccacggcctctgaggcagagaagcagaatgtgttctgtcttcctgggccccacaaagcaggctctgggcttttctctcacatcccagccaagaggagctcaagttacatggcgggagaagtgtgatggatgctaagaagggagttgagggaaccgcagaggggctgcggctggcgagaagcaggtgggcctcagggcatggggagcggggtgactcgggaggacaccagacaacccccaggagttcttcagtgttttttttttggagactgagtctcggtctgtcatccagcatggagtgcagtggcacaatctcggctcactgcaaactccacctcccgggttcacgccattctgctgcctcagcctcccgagtagctgggactacaggtgcccgccaccatacccggctaattttttttttttttttttttgtatttttagtagagatggggtttcaccatgttagccaggatggtctcgatctcttgacctcgtgatccgcccgcctcggcctcccaaagtgctggaattacaggtgttagccaccacacccggcctagttcctcagttttggggcacagcctgtgtctagacaacagagctctctttctatcagctgagtgtctctgagtgaacaccaccccttgggaaaggagggaggactgcgtggggtcccagtgagcagcccccacgtccaggttgcagtgaatgctgccagaattgtatgtcagcacacccactacacaggggcctgacacacaagatattgcccggactggcctgggcaacacagcgagaccccacctgtacaaaaactttaaaaatgcagtgagccatgatcgtgccactgtgctccagcgtaggcaacagagtgagagaccctgtctcaatatcaaaaattgaaaattgaaaaaaattagccaggtgtggtagtgtttccctgtggtcccagcagcttgggaggctaagatgggaggatcactggagcccaggagttccaggctacattgaactatgatcacaccattgcactccagcctgacaagagtgagaccctgtctctaaaaaaagaagttgctcagtggtaggactaacttggggaactgataactgtgtcctttttctctgtcacaggatttttctttttctttttttttttttcttttttttttttttttttgagacggagtctggctgtcgcccaggctggagtgcgcagtggcacgatctcggctccctgcaggctctgccccccggggttcatgccattctcctgcctcagcctcccgagtagctgggactacaggcgcccgccacctcgcctggctaattttttgtatttttagtagagacgaggtttcactgtgttagccaggatggtctctatctcgtgacctcgtgatccgcccacctcggcctcccaaagtgctgggattacaggcgtgagccaccgcgcccagcctgtcataggatttttctaggagtgtttcttgaaggcaggtagagagactggatgaagcatgaggaattgctttctggcttgactcacttcactccaggtgctgcctgaagctggggtgcctcccagcctgcagactgcctcctccttttccatgggaccctcttcagcccctttcattgttgggcagctctggtctcccacatgaccttcctagagctgttctcatcttgagtctgcacctgtctggggggcctctgtgcaggctgctgttggtccctctgtcagggggtgctttaaggctcagtgggtagttacttgggtaaaccctttctttcccccttctctttccctgctttgtcccagggtagcatctgagggaggaagtggagttacagtgatatgggttagctccccaggggccagcctgggccattggctccattagcttagtggtttaaagcagcgaggtattgacgtttttcagtctgtcagttctgctggttggctggtcccgcccagctgggcactgttgctggggccctctggtctttgcagttgcatgtcagctgggctgggtgtccccagtggtttcatcactcacatgtgatggccaaaacagctgggactggctggaccagtctctgtgcctgtctccatctcccccactatagcgggggctagtgtgggcctctgatcccgtggtggtttggggcagtcagacctcagctctcctagagcaagcattccgagggctcaggcagaagctgcaaggcttctgtgacctcacctgaaaaggctgccacgtcacttcctctgcattctgtagtttgggaattgagccataaaaccagcccaggtcaagtactacgggggctatgagtagatgcagccagagcctccggcctcctcaggactgcagagatgggccgggggccttgcagagtttggtctggtgtacagggtttgtcagccatgagtattagggctccttcttcatatccacaaaagcgcttggactcaaaaaataggaatttggcttccagggtctgttgctttacaaagacgcacgatgacacacaattcagaaatccttgtgagtgagtttccctttcctccagcagcacaacatctatgtgcacgagggaagcagctgcccaccgtgcaagggggtccatcagtccgtggcgctggttcctcctgaactcacagccccaaccctggaacctccatcaaggcaagaggaggaagtgggcgctccccagccttgccaggcccccagcagacccagtctgcccttggggggtttgtgaatgttcaggtgtcacatttcaggacctgtttactgagattgtctgctctgtaatgggctcccactctttcctcagaaagctgtcaggtcaggcagatgtttcaggtttgccattgcttccatctgggagctgcaaggcgaaggcacgggcggcctgtttgctgcccttatcttcccagtgttggggaccccaggaagtactgtcttctaaggcccgacaatccaaaagaaaatcactcctgcatgctcctatccccttcaaggttgcatcctgtcagagcatccatcttgcctctggaggccgtggtgctgctgccatctgggttttgggggctgctggatgtgggcggctggctctgaagaggcagcatgtgatctgacagcaggatgctcccgccccaccaaatgacagccttggggcagctcccggcaaacaactccatttccttctccgaggtgggaatgggacctggtgcaggggacgcaggctgtcggggcaaacctctctctccattctaggggcatgcagggtggctatgagtgctctcaggaaggtcactgttcccgaggcctgagctgagcactttcagatcagcagggctgcctgatccccctgcagccagccggctgtctaaggtgcccgagcctcctcagcactgaagtctcacctcaccaggcagccctgagaggctgcgggacagggattcctctgccctgccatgcaggagccatggagagggaagtgtcacttgcaagaggcagaatcaagtgagacccaggtgtcttctagctcactgggtgagggctctctccacagcctgacttgccggcagtcgtttgaagtccaaggctgggcaagggtggccagtgagctccaggcctcagcttgctaaaggagctactccacaggagcatgcgggctcagggctcagcaccctcacatgacaggctcagccagcctctcccccatccccagccatcatagacttaggaggagattcctggctctgaggacatgggggcttgcccccttctctggggctgtggtatcaccccagggctggatacccccttgccctttgttcatctggtcctgggaacaccttgtcccttgttgggagctgaggctgtgccacagagtggggccataggtccctgggtgctgtgccggtgccacacccacctgaaggaggtcgtgatggcccccagctcagggtgcaggaacctgcttgtcagacaggtgctgacatgtcaccctgcaaggcagggggagggagggctcatcttcataggggggtggggtggggtgccgtgcagggagccaaaggcacttagatgggcttgctgggccgagggtgggtgggccagtcactgggctgggggtggctaaggaacacagacccaccagccagcccttcttgggaagctctggggggtttctgctcagacctgcactcccccgagtggaaccccgagttctgccatgaccttcaccccgaggcaaggggacagggccgggcaggcttcctgaggcatgttgaagagggatgttctgcaggcagaacatggccatgctgggccatgtctgtgggccaggccccaggagggcgggggatgttaacagcttggttcatgtcaggtagggcctggtgagcccaagatgagtgtttgcacaagggacaagtgagctggcagggctggtgttggctctagcagagccctcatcccacccttgcacacagccagcagcccaccctgctaggcctgaaagaggtgaggaggaaaggttctagtgggaaatggttctgtggctggagaaggcattgctgggccctgcctgtctccccaagccagcctggaggaggatttcttgtaccgaggcctcacgagctacaggtcatggtcatccctaacttccctagtgtgtgcaagacttgggggatcttgctgaaatacagactttgatcaagcaggtctggggcaaggaggacacgcttcatttatacaagttccggagaagctgccctgctgctatggcggtgacagcggtggtcagacattcacggggccagccccaagcccacctacagccttgcccccacctgccgctcccctgttgtgtctgtccatcctggtagactgaaccctaaggacagaaattccttttatccaggggttcctccccactgcctgctatagcacctgctttttaaatgagctctcagcagatgtaaggaatgaatgaatgaatgaatgagggagaggggtatgtctttcctgcataccaggcaggcctgttcagagaaccacaaaggtcccagcctccaaggacagctccttcccggcactggctgaggggacactaaatattaaccacgtactggccgctggttgctgagcagctgaaagccataaccttttgctgtggaagtgggatcgtgtctcaatttaagtttataatcccggcctctcctccaggaaattctatggaagttcctggcaggtaacagaatttctgtgcttgtgaggtcagggccagtgccagcgggtcagggagtgggggtggtgcgtgtcagcgagcgggtgagaccatttacgctgataacagcctggcctgcttccagggatttttgtaggtcacataaaatctcttgatcactacgttttacattaaggcttctcaagatgggcaggacgggcttatgggatttgtcctgaactatcacatcacttccaaataaacttggtgcccgggacggctgctgtggagtgaatggcagacgctgtccctgggccacgatgccatccctctcagcatgttgggctagatttccactggttttgtttactttagacagtttttataattaaatatttccctgaaataatgcctgcaatcattttgagccacatgctctttttcctgaattaaagatctcttttagaaagtactgagactcttaaagcctctctcctttaaaaagtgagcttaacaaagtttttcattttagaaacttagaggggccagtgaccctgctgtgtgcggtgtatgtagaggtgactggagcctgtggtgcagcaacagtcccctgtgggctggcgccacacaggaagtgcctgcagctccacagccctggggtgagcctggcgcctccattttctgacagtacctgaacctttacctcccttctcaaaatgaaggctgcgtgtcacaaaccggttggaactggccgttgccatggttttcacgttggaaggcacagttaaagggtcatgtgaccaaggagggaaatgcctttgtcacatgactttttggtggcctgattagcatacaggaagttcactccctgctggctgctgggatgctgagtgatcattgatgggtggtgacatcatctcttggatgagttattgattagtcgcaggccaagatggggccagggagcgctgtgggcagagcagccctctcaggcagcttcagctgctaggtggtctggacccctcgcctaccctcttccttcaggcaggtttgaattttattagacatctcacctctggaagaagcacacgccctcaataagatgataagaagggttaagtcccttagagcttggctgtcatttcatttcagctcatgctagcccaggaattgtgtctgtaactctatacaagatgctgccttggccccctgctcccctgttcactttggaggccacctgggtggaggccagctgctgcacctctgtgctgaagccttgggactgcctgcctctgaggtgctcagtgtgtgtacacgtccagggaacctggaattagagccctgaggtcaccttgaaagtcgatcttgggcggcatggggccggcagcaaggagagacatgctggcggtttgctaagacctgagtgaggtgtcctgggttactttagaaacaaactacccggttctgggcttcagaatgtgggctgataaccccttgcctgggggattgtatacttcgaaatcgtacctttctgtccacgcccaggtctctggtgagaagctgcttcatcagggctaggaccagcgttcaggtacagccaccacgtagctgtggtgggtggaattaggagggaccagaggagagcaagtaaagcggttcctgagtccagcatctggcgagtccagggtagcattggtgaagccttaacctctggtgctctgtgtctacccttccctgaggacgcagctcatgggtgtggaggggacctcagaggtcccgagggctgctagagcagagtcaggttcttcatcctagcgactctcctcaaccctgccggggtctaattatcaactagaccctggcacagcaagagccaggacaactttgagctgcggcaaccagttaactttgtccgagtttgttctctgggtcacagtgccacctagaggacgtgtctgtccttggctggttttcctgctgacaaaaaaaatggacttgattcacttcgatgaatgtacaatgaggccgaggcgggcggatcatctgaggtcaggagttcaagaccaccctggccagcatggtgaaaccctgtctgtacaaaaatacaaaaaaaaaattagcccggcatgatggtgcatgcctgtaatccagctactcaggaggctgaggcaggagaatcacctgaaccggggaggtggaggttgcagtgagccgagattgcactacggcactccagcctgggcgacagagcaagactccatctcaaaaaagaagaaagagaatacaatgaacccagatcatcagggacagtttgccttgtgccgtcagcaaatggagctgcttggttggggacaaagtgccatctttgggacttgcgttgggtcagcgacaccacagcaggtgttcagccttgcgccttcagtagtgtcagctgtacacatacatcctagaggatcgttcacaggaaagggaaaatcagactagtgtgttcctgcctgggtcaaatgacttggggtgccttgagcacttgtctcggagcctggcctgcagttagcacagaatggatattcactgtttcccagttctgatgaataacagcagctcatcagccacactcttagacgtttgtgaccatactttgacaaaataacaaaagaggaaagcctgcaagtacttccccgattgtcccctggtgcttcccaactggtagtgagatgccgtgggccgacggtgaaaaggggaggaacaggccttaggtcaagttcacaggtggaagtgagctccccagaccgtggcaaattcattagaaagaaaaaggtgtgggggctggaatcatgagaactgtctcatgttgcagttttgagctgggacttacggagtgggcagcagggtaacaggcagaatgaccttggcatccacgtggggctggaggcagccagccagaaaccagtccatgagtagatcaggcaggtgaagagtctctggtctttgagagaacttgtgtcctagtcagtttcaaaacagacagccactgccgccatgtggggcccaagaagggccatctagcacctggtgccaccttgtgagcaagctggcagcctgtggatacacccctcggtcttctggggacaggttggctgccaggtgtgagggctttggcctgcctgagtggagagaagaaaatctggttcacgcagggagctgggctccccttcaaggggtttccaccatggccaggggctgcgggctggtggcgaggcacacacatgccatcagacccagcatgctcaagcccccacaatggctaacactgagcagggccccaggatcccgagccgagtgtttacctgatccgaggcacacggtagagggagcagccatgttttccaaagtcaccatgtcatgctcaggggcatacgcaccctcagccctggcgacatggcggcaggcatgaagtccctaccatcagggtgcccacctgggcactgggattgggtgccctatgacgtgtgggtaagaagaaggaggcagcctgggagccatggggcagggcaggggatgtggaggatgcagggcagacagggaacagacggggaggtctcagctccctgccatgtgtccacaggggtgggcactgggtccagctgtcaagggcgctctggtcactactgtctccaccccacagtgacatgaagtccgagaggagacccccctcacctgacgtgattgtgctctccgacaacgagcagccctcgagcccgagagtgaatgggctgaccacggtggccttgaaggagactagcaccgaggccctcatggtgagccacgtgttggcgctgccgccggagccccactgtgcccttcctactcatgacaccctcaggtggagctagtgatggcagggcctctgctcctcaccaaggacgctccctctcaaccctgttcctctcgcccctgcagaaaagcagtcctgaagaacgagaaaggatgatcaagcagctgaaggaagaattgaggttagaagaagcaaaactcgtgttgttgaaaaagttgcggcagagtcaaatacaaaaggaagccaccgcccagaaggtgcgtgcctgtctcccctccttcctgggccagcaggagcgcctggccttgccttgatcccctcatcaatgtcagcggccagaaaggtgaaagggcttccttgagggagtatagggcaaggtcccactcccgcatttgtggactccagtgtgcattttggattcagcttacaagatgttaaagtgaatttcagtctagagtattctggttctgagggtctaaagctcacttttttttttttttttttgagatggaatctcactctgtcgccaggctggagtgcattgacgcaaccttggctcactgcaacctctgcctcctgggttcaggtgattctcccgcctcagcctcccgagtagctgggactacaggcgcgtgccaccacacccagctaatttttgtgtttttagtggagacggggtttcaccacattggccaggatggtctggatctcttgacctcgtgatccgcccacacgggcctcccaaagtgctgggattacaggcgtgagccactgtgcccgccctaaagctcacttagacaacaggtgtcaaggaagtggagcacagatgtctggtgccgctggaagcatgtttctgggtgaagcactctgtgcagaaaggccgcctgcactgtgggcgcaggggatgccccagtctctaccatcatccctcctgctgtgtgcgtctcagtcccctcccagctgcaagtgtgctgagctcccgtggatctcagccccaactgtcgggagggtcctgcttctgtttcttcttccctggagcccgaagctcgctgttgcgctgcttctagatgcagcttaatgggcagcgaggttaagtttattttgttaggctttttgagtgctctgttctgggaaactccgaccttccaagtactttagtcattgcctcagtgacccagaaagtaagtgtgttctgggcagcaggagctgaaggaaggacaggactctctctgctctggcttggggtttgttttttgaaaccctgcccccactgcccccgcgccccctccccgccccccaccttacacctacctagttagcaagtggattggaaagagcctgctggtttcttttttctatttctttgtcacttgtcgaaaactcatggagggacaccaagtctgtcactggcccttctctactggaacatgcagctttaaaaagtgcccagagtcaccgttttctcactgagattgagatctccctgtctgggccatgggtcctttgcctcagcagtgctgccaccatcagccattctgtcccctagagggcacagcgggtgccaggatactgcgtgggtgtcagggagcagccaagaagtgatgctgagagtagggggtggggctgctggaaaatctcttctaggcccatgtagaaattgtcacttcccactgcagatggggtcactttcagccttcaagcagaacctctgagcgcctgatgccgtagaggaggaagacagtcagtcctcttcggcagcattaaatcttggcaactccgtgtgaggagagggaccggcccggtggcccctcacctcctggtgtcctgctctcttgcagcccacaggttctgttgggagcaccgtgaccacccctcccccgcttgttcggggcactcagaacattcctgctggcaagccatcactccaggtcagtgtcctttctgcgtctcactgggtgccctgctggcactgctgctgtcaagcacaggctcctcgggctcccaaacagccctggcccaggttctgcaagaggttgcgctttccttctgagtaggctggagtgaggccctccagcccacagcctaggggaagaagcacacgtgcactttccaagccccacggcccaaagtaggccactgttaatgtcacagacagaaatcatggccaacactggaagggggctttccagtgagcgcccctagcaagcctgatctcccttcgtgttgactcttccggccagagagcctccttccagggcctccaggtgaggggcagaggttttctcccagccatatggctgaggtcagaagaggccctcctgcccctccctctcaaacaggcctgagccctcagcttgctctagggggtgaccatgcccatcctgccgtgggccggccagtgtcacgtgagaatgaactgccacgttggtgggactcactcaggagtgagcccaggtttgcacggctctgggtggagtcactattccttgttccagtatctagaatcagtagtcatctttcttaattttgtgttatacgtttgccttgttagtttgtttgagacagggtcttgctctgttacccaggctggagtgcagtggcacgatctcagctgactgtagcctctgccttctaggcttaagccatcctcctgcctcagcctcccaagtagccaggattacaggcacacaccaccatgcctgggtaatttttccattttttgtagagatgaggtttcactgttacccaggctgttctcaaacccctgggctcaagatatccacccgccttggcctcccaatgtgttggaattacaggcgtgagccaccacacccagccagcttttttttctttttttctttttttctttttgagatggagtcttgctctgtcgcccaggctggagtgcagtggcgcgatcttgggtcactgcaacctccgcctcccaggttcaagcaattctcctgcctcagccttctgagtagctgggactacaggcacgtgccaccacgcctggctaatttttgtatttttagtagagatggggtttcaccacgttggccaggctggtctcaaacttctgacctcatgatctgcctacctcggcctcacaaagtgctgggattacaggcatgtgccactgtgcccatccataattttctttaacttctctgctacttaaaaaaaaaaaaaaaaaaaaactagtatgtactttcataaaagcagcaaaactgcttgctttaaaaaaagtgtgggggggtccggtccatgtaaatctgggtcttggtatcgttggcagacctcttcagctcggatgcccggcagtgtcatacccccgcccctggtccgaggtgggcagcaggcgtcctcgaagctggggccacaggcgagctcacaggtcgtcatgcccccactcgtcaggggggctcaggtaagcagggctgtgcacatgggggagacctggcagcctcagcagtcgtctaccttgaaagtagggcccttcccagtccttgggggcaaggtgccctgtgccttccggtcccgctccattgttgatctcagtcagatttcttgttctccccaccctaccccaacagcaaatccacagcattaggcaacattccagcacagggccaccgcccctcctcctggccccccgggcgtcggtgcccagtgtgcagattcagggacagaggatcatccagcagggcctcatccgcgtcgccaatgttcccaacaccagcctgctcgtcaacatcccacaggtgagggctgcgccacactgtgccagggagagtgtgtgtcccacctgtgactgctccccttggacccaggttctggggcacagtagtgtttccctgggctgtgtggcatgacctgccttgctctttcagagccaggcaggggcttggacttgagctcctgggggccacagggctgtctgggtcgtgggcagaagttttgtgggcagacttgctatccagcacaggtgggcagctgacgagaggggcgatgcacggacctgagctgaaggtggggtctgcttaccagccccatggctgaggaaacagcatgtggcacacagcaggtttagggggatagtcgaggcccaggagaggccggtgatgggcccggagatgccttggggggcaccggagcccatgccgccctcccggcagtggcttcttccgattgcctcctcagcaaatgttctcatgtcaccaggtgcgcctattcttagccgcacgtcccttcacctctgtacagagcctctcagatggggagggtctgtccccacccactggaagtaggatgggaagagcagaaccaaggggcgggtgggctggaaacaggcgccttggctgacagataaaattaccaggtctgcaggggcttttgttggtgggcgtgttcgctctttcttccctctttggcacagtttgttcttgcccaccctcctcagacaagagcaaggctctgggcagtgtccctgcctgctttcgaaggtcaggttcgagtgcagagaagatggctagtcctggactgacccaggcaggtagtttcatacacctgttgactttttttcttttttggagacagtcttgctctgttgcccaggctggatggagtacagtggtgtgatcaaatatctttattttattatgagacaagagtctccctctgttacccaggctggagtgcagtggcatgatcttggctcactgcaacctccatctcccaggagatactcctgcgtcagcctcccaagtagctgggactacaggcgcctgccaccatgcccagctagttattgtatttttagtcaagacagtgttacaccatgttggccaggctggccctgaactcctgaccttaagtgatccgcccgacttggcctcccaaagtgctgggattacaggcgtgagccaccacatcctgcccacccgtgaacttttatccagtcctttctcttgtctttgtttcctgagggtgggcacaggcagtcagtggcagagaaggtggtctgctcctagcgtggctgggggaggctctgaggggaaggaggaggggaactggctggtcagaggtgagggaggcctgggtttggtcttggttgctgaggggacaacaaaccagcaggccggtctctgggaacctttcttggggggtgggaccctgggaaggcatcctgcacaccctgtgccccacagtgtggcatttgcaagtcattgggtgtgtccattttctgggggtggggtgcacagctttcatcatatttccagaggggtcctcagcccctaaaagcaataacattggcatgtgggcagttctgggtttcagggagagccctatccagcagttgtggggctggtggagacagtcaagggtctgctcctgggatccaggcaggactgtgaggtggcactggagcggtgaggactgggtggagggcaaggggaagaggttggcctaggagctgcttcccccatcgccccataaggactcggggactacctcaaacattagcatcccaggggagcacatgcagagaggctcatgggggtgctgcggtgagcaccctcttaccctgtgagaaggcagtaggccaggccacagccagaggacagtggccctgctgggcagtgtggtgaccaccagaacctggtgacagccacatgggtgccctcacattcacatggcggagcacagcaaactatagattttaagtgtgtgcggtttatctggtaaacctcggtgcacatgtgcagatgagcagccactacctagggtggtgtgtttctcgcgcctctccctgctgccctggcttctgagagcctgttatcatggctgggttcacttttgttaaggacgccatcgtcaagggtactggttagtgcagttgacaggacctcgggcttcggggcgctggggagccttcctctgggcaggcgcacggagcgccctgactgagtttttgtctcccaaagcccaccccagcatcactgaaggggacaacagccacctccgctcaggccaactccacccccactagtgtggcctctgtggtcacctctgccgagtctccagcaagccgacaggcggccgccaagctggcgctgcgcaaacagctggagaagacgctactcgagatccccccacccaagcccccagccccagagatgaacttcctgcccagcgccgccaacaacgagttcatctacctggtcggcctggaggaggtggtgcagaacctactggagacacaaggtgagtggcctggacccagccgggctgcttccgcctctggcctccaagggtgctgccccgtgggttctttccaacacacagcagaggctggggcagggctgcctagccaggatggtcctgggtgggcttggcagggacaccgtcagtgccactgtggagtctggacactgtcctccggttggggcctctgagagccaggccccgagaggctcagggtccagggggacgggcagtagtggcctccgtgacgttggcgtgtggtggggtagacgtgagggtgcacatctgtgggaggctgacagggttggcctccacgaagggctctcaggccaatgtggagttgtgacacacaggcagaaccttccagagcctcaagtgctcccagcttctgaggagggagagggacagcccaccccactgcccaggggcaggctcgcatgatcaccctcttcaggcagcgtgggagtgcactgtgtcctgggggatttaggaataaaaagacatctacggggtgatcacagcattggagacggctgggcgggtggatctgagtggccgagttggcccccagggagcccctgctccccagacatggagaccaaggacgtttctgcccacaggttgaggttggggtgacacgagtaggccaggaggctgagtcctctcctggtgactgcatcagactctcagagcagaggagtcggcaggactgtgaggggcccagggcaggggcagggcctggcagcctcagagccttcccagcacagacttgggagcagcggggtgggtgtgtgcagagaagcacctcccgcgcactgcccaggatacagagggaggagggcatgggggccaggtcgagctgtgcccccagcacctggggttgggaagatgctctccccactctcttagggtactttggtgcatcaactggtgcccccatgtggttgcacccagggtccccaagaggcagagctctccacacttgcgtggggctgggcctggcgcagcctcagagtggccctcaaatgtagagttgcttgtaacccactcccttgcccctcagtcgctctcgtaactcccggccacaggatggtaccgagactaactgcagcgtgccccaagggcatggcctccagctcccagctgcaggagggacctgggggagctatggggaggtgaggctctgacacagcccggctggtgcctttggtgcctccttttcgacaaggtgatgtcggcaaaagagccacctggggctgctgtaggaaatgaggattgggggccgagttgggaccagtgcctctccttgcccctgcctgtgcgggcatccgctctcccagaccagtctgtctctgccgttccctcatcagggctcagtctccctctcctgttgccaaggataggacctcactgtgggagagactttgagccctgctggaggcatctcctgacacctcccagagcccccagcctcgcaccatgtctggttctggcgccgctcacgctggccatgggttggacgtgtgcaaggagatgtgccgttgtcaccagagcatgtaagctgcaggtggcggtctcatgggtcaggggcttagaaggggccaggccagtccaggcaggagagggaaggccgagagtctcgccacatccatctccccaccccccagcccctgcagtcctctgacattgtctgtgatgaccaagagcaattaaggcccctaagtgctgaacacaaaaaaggtcggcacaaatacgcccagacctcacgcccgagcacatgcttcatgtacacttccccagctacctcttgcagcccccaaggagactatgcattctgtcccccagacaaggggaccaagcccttgctgcccctgtagcctgctgcccaccttgtgcagtgggtgcagcccaaggcctggggcctatcccgggtgtgagtcctgccctgccactgagtgacaatgtgatctacaggtcacttggtctctcttggcctcagtttcctcatcaggacatggcgcatttgggggttccccgtcctaagaatgaactgagtacctcagcacccacaaagcacttgctgggtgacttgcctgtcacccttattaactcgtacacaagcaagggtgcccaccacactgaggcagggcttggcatggtccctgctggtcctcagtggtgtcatgtccagcgatgggtgggacaggaggccgacgttttctgaagctgttcggcgttggccggccccatgtccacatgtcattggtgcccagtaggcatttgcagaacggacagactgtggcgactgagactccagcatcctgggctgggggcggccagggccctgactgtcgtcctggccctctgacgtgagccatgtgctgtctgcttgcagcaggcaggatgtcggccgccactgtgctgtcccgggagccctacatgtgtgcacagtgcaagacggacttcacgtgccgctggcgggaggagaagagcggcgccatcatgtgtgagaactgcatgacaaccaaccagaagaaggcgctcaaggtggagcacaccagccggctgaaggccgcctttgtgaaggcgctgcagcaggaacaggagattgagcagcggctcctgcagcagggcacggcccctgcacaggccaaggccgagcccaccgctgccccacaccccgtgctgaagcaggtgagcctggcctgctgccggcagtgccgtccctaggaggcagaggccgttccgcgatccaccccacgcctgcgctgcaccgcctgattgttaactgcacgtctaaattgcagttaatggtggtgttgggcggcaaaaacactaatttgcagtttctttagactttgtagctctcacttgcaggctgccggctgacaagtactgcttgtcttcaaggtcttttctgaaagccacgttgagataccaaaggggcgtttggaaaaatgttcttgctaaatttggagaggaacaagtttgaaatcaagttttttgttctcgtgttgttttattttaatgcttctccttcccaccctcttgtagactcgaagctcccttttggcaatttttgttttcttggaagttctttgcaattcactaaacgcattttctcaagatccccacttggcgcctaaagtccccaggggacgggcctgtcctgtggggctcaccctcggtcaccctgggccggccagcggaccgcactgactttgctttcaacccccgtttgtgtaggtcataaaaccccggcgtaagttggcgttccgctcaggagaggcccgcgactggagtaacggggctgtgctacaggtcagaaccgcactgggcgccgggagcctcgcgcccccaccgcagcccgtgaccacgtcagtcgccgactgtcacgctgcctcttctgtctgtctctccctgtttctgtttcactctctcccctcccccacccctctgtgtaacttacctggtctcctgattttggactttagggaccccatgtgggtgggaagaggtcagccagagcaaggagaggctgcgctgagtgtctcgcctgctgctgtcttttccctgcatgagccgtcacccccctttctccactgcaggcctccagccagctgtcccggggttcggccacgacgccccgaggtgtcctgcacacgttcagtccgtcacccaaactgcagaactcagcctcggccacagccctggtcagcaggaccggcagacattctgagagaaccgtgagcgccggcaagggcagcgccacctccaactggaagaagacgcccctcagcacaggtgggtgacctccacagggctccccaggggacctgcccattgtggggttcacccttccttaaccgaaacagaggcacatgtgcagcgggtgaacccccaggcccgcttcccaagctcagcctcctcggactctggctttccctcttgcccctaaccaggataccctgaagaagtgacagccccgagcagataggaaatagtaaccaccctcactctctgcacccaggctcagtctttgaccgacaaaacatgggccaggcctggctcagagggtgcccccacagccatccatgtggactcttgtcagcacacacccctatcttgcccactcagggtcccccttttctctttgtgccgcagcaaacatcttttttctgtcattgtgccatccatgctgcggtcacactgagtggtgcaaagtagaacagtaatgcggggcagggggtgtgcccagggcagcggctggctcacccggggcaggtagtggaggccttgccggagacggtgtttgaagaacaaccagtgggggtgaaggtcctccagtgggctctccggagtcaggtgcggccccaccgtccctggcatggtcccgatggcctgtttattttttcatgtatgtgttaacattagaacaaaagtgttatatttcttgtgtcaaaaatagggaaagaaaaggtggtcaggaagggccaagttaaggagatgggcaccctctgggagaggaagcaaagtgtcccacatgcaccctgaagcctgtggccctgcaggtaggagaggacaatcatgagacaggccccaggcagagtggtggggggagcctgagagcctgctgagcctgccgctgtcctaagtgaggggcgtgcccaggtgccaggctctgcaggggcacttcaggaaacagcagacgttcggctgcagaggaatccaggcagcctggacagttgagtgtgtttgtcatcaaaccagccagccagacgttctgctcagcaggtttaagacagctgaggactcacgggctggtcagaaattactcttgtgggaagtttgaaaggataagaaagaagtagaagtcgataagtgtgtgcatgtgggcacggtggtggaagtcatctggaagctgtgtgtgtgtgtgtgtgtgtgtgtgtgtttaaagtttgaaagggagcatgaaggcatcactagttgtgtgtctgatggtaggattagagggaaaataaatagttgaaagcaccatttcctaaaagagttaccacgggggttttgagagagcgcctggcaggacccagttgccaggtttctggagtgctgcccttgcacacagggttggttcctaagaacatttgacctgggaacgctttttccacaaaatgtattagccaccactaaaaatactcttagggccagacatgctggctctcacctgtaatcccagcactttgtgaggccgagatgggaggattgcttgagcctaggagtttgagaccagcctgggcaacatggtgagaccttgtgtctacaaaaaaataattagccaagcacatggcatgtgtctgtggtcccagctactcagccaggaggctgagggaggaggatcgcttgagcatgggaggttgaggctgcagtgagcactgattgtgccactgcactccagccttggcaagagtgagaccccatctcaaggggtctggggcagcccttacctccaactctggccaaaaattctgcgtgtgctgggtgggggcatttatttattttccaattataaaaatgatatttgtccatcatggaaatttggaaaatacagagagaaaagactgtggcaatggcttgtattttcctcccccaggtgaacaaatattacatttaagggttttccccagtgtctccccttcacttgagggtcctttgtggaaatgtgtgtcttgcgttggctactttgtgtgttaatgagagacccttactggacgcattaaaatttgagctgggcacagtggctcgtgcctataatcccagtgctttgacaggccgaggtaggaggattgcttgaggcctggagtttgagaccagtaaacaacaacaacaacacttgagggtaggagatagtttttttttcctttttttttttttttttcttcttttggagaagcttcttgctatgttgcccaggctggaatgcagtagcgcgatcatagctctcttgcagcctggatctcctaggcccaagcaatcctcccacctcagcctctggagtaactgggactacagggatgtgccaccatgtccagctgatattttttttagagatggggcctcactatgttgcccaggctggtctctatctcctggcctcaagcagtcttcccaccccccagcctctcaaagtgctgggattctaggctgagcctccgtgcccagctaagatagtttttcattgctgcatagtattccatcctgcattattgtcctgttgcacacatttgtttatggttttccactgttctaagcagcaccgtggtcagcaccttcatttctgtagaacgtaggtagctgctcaccctctgatgattgccccacacttgggattaccttggcagagcctggcaatgtcaaggccattgagttgctgcctaaatactcttcagctctgggggggcctgggatttgaaacgttgattgaggagtagtgtgggtgggtttgcaagggctcctgggtccttagtctgtattggggctggggtctaggcagctatggctgggctcctcccaggagccctcctgacgagggccttctcagctggtcgctctgttctgttgcaggcgggacccttgcgtttgtcagcccaagcctggcggtgcacaagagctcctcggccgtggaccgccagcgagagtacctcctggacatgatcccaccccgctccatcccccagtcagccacgtggaaatagtgcgagccaggccccgtggaagacgggctccctcctcccccacctggcccctggtctagaaggacccactgcaccaccctccgctggctcgggaagacaccgtgcccgccccaagagcaagcaccggccatgctgcagaggcaagacctcaattcttggctgcaaagtttcatcagggctagggggctggtgccgcctcataggcagacgaggatcatcgctgggggacctttcccgtgggctttcttcctttctctctttgcctttagtttgcccgacaccagcagaaaagtggaccttgggggctggttctgctcctggcccccttgttcagcccctgccggcacacgggcggctcaccctggacactgtgatgcgcatgggcaaggccagcgcccggggcttctgaaccgagcggggtgtttcatttttttgcttttccctgtcttaggctcccagtctttgactgccttcccatggcgatctataagttgaaagattttttttttttttaatcacctcatgatgatggagttaaaagtaaaccgtgcagaccctggggtccctgttgtacgctgcatcatcccgctggccctgtgccctggagggtgggcggctcatggtgccacagcccctggcagggacggccggcccgcccccgtgactgactgacagatgcagggatggccgaggcagccctcgctccagctgaacgcctccattgctgcttgttctggagacccccgcccccgcaccttccagacttagcagaagaacaaactgaagaacagacccagccagagaagcagggattccagaagctgcccattaagggagaaggagaggatccggtcggcagcagccctgagcagaaagctggaggggggactgtcgcggggtttttctgttgtggtttattttattaaattttttccttttttctattcatttcgatggacgcaatcttaagccaccctggccttgctcctgggaggtgagcgtgcacaggtgtgtgcaggtcaggaggtgccgtccaggtgtgcggcgagccgctgcgcacagatgtcaggatttccgtttgggtctagtttagaacctgtccttaaacctaggggttgctgtcaggatttgctttcagactttttttttttttgtaattccctttagagtctacaaaaatgtttttaaaaggatcaggtctgcttttagtttcatttttgtttctttcccgtcccactctttaaaaactggttccgtgaggaaaggcagaagccgttccgtgtctcttgcaggctgggccggcttcatgccagtgcgagggcgtcccgtgcccacgtacatacgtatgtctccatgagttctgggctccactggttccaattgagctccagccctggttttcctacccatgcagttagggactttaatttaattttttttttgtagggccaccgccttcaaacacaactgctacaacattctaataaaggctcatttaacccccaggctcctgtcgtgtgaatatcctcagtctgtaggaaactttttttgacacagcatagaagacctagttttggaaaacattatctaattttttgttgtgcaaatccccaaatttctcactaatttttgtttttttgtgcataacttggatgggctgaaggaggtgaggacagattggggaagggtggctttcattccaagatccagggatttggggaaaaggaaggaatttgatgttttttggggtgggaggggagggtgtgttttttacaccaaaaaaaaaaaaaaaaatcaagagtatgcaagcatttctattcctcgcatttttctgtgtgcctggcaaataaatacctgtctcctacgaccctgagctgttagccctctctgttccatgacaggggccagatcttccagctcctcccagaaggagcacccaggctggcttcttcccactgaaagccctccccagcgaaccaacctcagttctatgcagtggctggggatcaggcatccagaccgaagtcacctctgcctgctccagcttgggtcagctgggtctgaccagggggccagatccgagccgcacctgccggcccccagccccagctccagctcctgacctctcccagcctggcctggctgttcctccagggctgatggctgtcaacccatccttgtgagttcatatggactgctgcccctcgaaagggagagggtcggccccatgtccccagggagcattccatcagggacaacgtacatactgtgatgtaaactttttttttttccccccagggggcaaaagtgtgagatgccttaatctttccttcatttctgctgtctcgaacactctagcccattatttcctttcagttccttgcagcataacctctacgataagccccaagcgggttgttgtattatgacgtttatgatgttccaggtgaaggcattattaagtacctctctgggtgtggggtttggacgcaccaggatagctattgattaatgttaagggtgttctacccacagcaaagcacaccctcttaaaccaggcactgcctgggtcctggtcccgagagccctaccaggatcaggttcctgcaagccgtcagaatgtgggagcccccagcccaactgattgtaactgtcccctgttacctgtgacatgaacctccaacagcacctggaaacggttccctctgtcagctgctctgtagacagggctggggagatctcagagttcacacctcgcctgttgtaggggaggttgggggtagggtttggaatggccaagtgcccttggaacctcccacagctatggccgtcctgacctcatcccaggaactctacggtgaccaggaaccacccctctgacgaggtctgtagcggcccttctcagagtggaacagcccacagtgctagttgtgcctggtcttacctgtactccacggacctcggtgaagcaaaagcttcagggcagagggaatgaggcaacccagtggcagccccgctgggccccgtggctcctgctctcctattggacgtagaggcaggggagagacttctctatacaaatattctcatcacagaagggatgatccttgctgctctgccgtagggtttttgatgctgagctatgctgcacatgacgttaacctaaagaacttggactgagcttttaaaaaaggacagcaaacaattttataatccttaaagtgtaatagacggttacactagtgcagggtattggggaggctctttgggtgtggaggctgtcacttgtatttattgtgactctaaatctttgatagtaaaacaaatgtaaaaagaaatgtttgccaccagatgggaatagaagttccaataagcaggctggaatgggtggctatacgttgtatcacgaggaagttttagactctgaaggataataaatggatgatgtgtcaactggacttttcttttgtcccttctgccctggcttctctgtattgtttcgtcctagcttcccaggcaggttggagggagatggaggatgacccttagttaatgagagaagcaaagggcggggtgcatctgctgctggggcctcacttactgtggggatggagtccccacggcccctctcctctggagctttgtggcaaacttaccccatgggctgggagagaggaatgagaatctcagtgggggctgggtttggtggctcacatttgtaatcccagcactttgagaggctgaggtgggtggatcacctgaggtcaggagttcgataccagcctggccaacatggtgaaaccccatctctactaaaaatacaaaaattggccggatgtggtggtgggtgcctgtaccccagctacttgggaggctgaggcaggagaatcgcatgaacccgggaggcagaggttgcagtgagccaagattgcgccactgcactatagcctgggtaagagaccgtgactttctcaaaaaaaaaaaaaaattctcagtggaatttgcttgtgtttgctgcatcagccttcacgctagagtggtgggttttcctggagcaattttcaggctgggggcctcgatggtgtctttgctgcaggatgtgatattacagatgtgcaatctaagcacagagtcaccaacctggatccaaaatgaacgacgtcctggcaaaaatgttttcaagtgttgatagtttcaagttttattcttaaggtgagacctgggatcattttgctgaattttaatgtgcataaaacatgaccctgttttcctaggtgctatttatttgaggcagggtctcactctgttgcccaggctggaatgcagtggcttgatctcagctcactgcagcctcaacctccctaggctcaggtgatcctcacatctcagactcctcagtagctgggactatgggcatgcaccaccatgcccagctaattttcgtattttttgcaaagacacatttttgccatgttgcccatggctggtcttgaactcctggactcaagcagtcctctcaccttggcctcccaaagtgctgggattacaggtgtgagtcaccacgcttggccgtttcttgtctttgaagcatccttgcctccggcctgggagctcataccttccccacaactcccaagtgcctggtcttatgggcacagagctggtagagaacatggtagaaactgaacctcagcctgtccagtagcgcgatcttggctcattgcaacctccgcctcccaggttctagcgattcttctgcctcagcctcccgagtagctgggattacaggtgccgccaccagcacgcccagttaattttcagtagagatggggtttcacgtgttggccaggctggtctcaaactcctgatgtgatccaccggtctcagcctcccaaagtactgggatgacaggcgtgagccactgcacccagccacttttttttttttttttttttgagataggctctctgttgcccaagctagagtgcctagaggctctctgttgcccaggctcaggcgatcctcccacctcagcctaccgtgtagctggggccagaggcttgctacaggcatttcttgcttggcctgagaaacattcctatggggtgctgtctcctgggcttggctcttggttcctcgtgaggctctgcttccctggattgggcacaggcttgtcagtgcagttggggcagattcaaggggcgggtcctgggtcatggtctcaaatagcctctccagctgagaaaatgggacactcccctcgtccctgacatcttgtccccgacatctcatcctctctgaattgagccttgggtctgtggccacatggcaggcagagaccctgaccccatctgctcccacagattcgtcggtggacagatggcatgcactatgccctgggccccggagatgtggcaggagctatccagacagaaacatatagcaccttgagaggagggcatggggtgacattttaggcaaggcttgaagaggggaaaagtgccaggagtgtgcaaaggcttggagataggagccagcatggcaggtcaagaacaaaaagggcaatgtggtgggactgggtgggaagacggggcaagggcgtgggttttagctaagtgcagtgggagtctagggaaggtcctgggcccagtactcaagctacgcccactctgaagccatgcccactaccccaaggatggggttttgcccattttccaagtggggagtctgaggcatggccccagtcaggagcagcacccttcgaataaaccagaggggctaggggctaggttttattttatttatttattttttcttttgaggcagagtcttgctctgctgcccaggctggagtgcattggtgggatcttggctcactgcatcctccattttccgggttcaagtgattctcctgactcaggctccccagtagctaggactacaggtgcaagccacccatgcccgactaaattttgtatttttagtagagatggggttttaccatgttagccaggctggtctcaaacgcctgacctcaagtgatccgcctcccaaagtgctgggattacaggtgtgagccaccatgcccggccccaggagctgggttttctacctccactctgatgtggtccagccaagactggaggctaggcactgcccctcttttagcctcggtttcctcatctgcaaaactgaaggggacagggccatgtatctatttggagggatgaagatagagctggcactgcatcaccagggcaccagaaagccattgagactgagtgagcaggggctgggcatggggagacccaccagaggagcagctatgtagggctcatatgcaggtaggcacgattaggatttcctaatatacctaatacatttccccatataccccaaatgggaaccactcccaggctctgtggggtcctctctcaatttcctccttaccttgccatctcctttccctctctccctccttattccaggcaaataagcttactggccttactcaaacacgccagctcccctcttcctggggaacaacctggactgtttctcttaccttcagagtcccttgactttttttttttttttttttttctgagacagggtctcactctgtggtccaggctggagtgcagtggcacgatcatagctcactgcagccttgaactcccaggcccaagcgattctcccacctcaccctcccaagtaactgagacacaccaccatgcctggctaatttttaaattttttgtacagatggccgtctcgctgtgttgcccagattggtctttaactcctgggctcaagcgatccgcccacctcagcttcccaaagttctggaattataggcgtgagctgccacgccctgcccagagtccctccttgaacacctcccaactctacctggcatttagcacaacttacaattattttatttccatgtcattcttttattttacttgacttttcaattgtctcgttttcggcagggatgggcccaagtctcttcgccatgagctctggggcctggcagacagtaggtgctcaagaaatgcatgactacatgaaggaacagaggaaggaacgagctagtgagtccagctgaatctcgcccagccccgccctgactcccccaccccctcttcccgagaggaaagggacccacagcagggagggcttcccccacccccgcaacgtcactgttgctagatctgggttcaaattacagctgtgagccgggtgaagtggctcatgcctgtaactccagcactttggggaggtcgaggcaggtggatcgcctgaggtcaggagttcgagaccagcctggccaacatggtgaaaccctgtctccactaaaaatacaaaaaattagccaggcgtggttgcctgcgcctgtagtctcagctactcaggaggcagaggcatgagaattgcttgaacccgggtagagactgcagtgagccaagatcgtgccactccagcctgggcaacaaagagagaccttgtcctaaaaaaaaaaaaaaaaaaaaaaaaaaaaaatcacagctgtgtcttttttgtttgttttttgagacggagtttcgctcttgttgcccacggtggactgcagtgacacgatctcggctcactgcaacctccccctcccgggttcaagcgattcttccgcctcagcctccgagtagctgagattacaggcgcccgcccccgtgcccagctaaattttttttgtatttttagtagagacggggtttcactatattggccaggctggtctcgaactcctgacctcaggtgatccacccgccttggcctcccgaagtgctgggattacaggcgtgagcaccgcgcccggggtttttctttttctttcttttttcttttccttttttttttttttttttttttttaagaggcagggtccagggcgcgttggctcacgcctgtaatcccaacactttgagaggccgaggcgggtggatcacgaagtcaggagttcaagaccagcctggccaagatggtgaaaccccgtctctactaaaaatacaaaaattagccgggtggggggacacgcgcctgtagtcccagctacttgggaggctaaggcgggagaatcgcttgaacccgggaggcggaggttgcagtgagccgagatcgtgccactgcactccagcttgggcgacagagcgagactctgtctcaaaaaacaaacaaacaaacaaacaaacaaacaagagatgaggtctcggctgtgatgcccaggctgttttcgaactcctgacctcaagatatctgcccgcttcggactcgcagtgttggggttacaggcgtgagccaccgcgcctggcccttggctctgccttttggcaagtgacatccatgtgggcctcagtttccttatctataaactcctactttacgtggagacaggccaccctcgccccacccctggctgttccattcttaaaagatgtggacggcgaggcgctggggtccacttgcttcccagcccatcatcacagcgacatcacgacccggggacaacaaagctcctttgagtttgcccatactggggagctcaaaaggtccaggctcgaatcctcccgactcccttttgagtcttggagcaataacctcaacatgcgtgactctaaaatagggtacccgcgcctgccttccccggatggagcgatcgcttctccactagtccgcaaatgggggccaccgttagagccaggtgcgaggaacagcgagtttattgcaggttccaaccgggaacctggcacccacggctggttgggaagggacgccctccgcgcagaggctgagagttccgcgcaggcgcaatgcttccgtcccctctggtctcgccctctcggggcctggtcgcagggaatcgcggatgcgcatgcgcctccagctcccgggatcgcggggaacgtggattccgaacaagggcaactgcggactcccccgtgggaagaaagggagggaagcggaagggaaaaagcgcatgtgcagcagcacgcggcagcttcgcatattccctcgaagcgcgcctcttgcgcgtgcgccgccctggcccagtgcccttggctgcaggaatggctggaaccacccggcttctagccggagtccccggcgcgcagccagcagttgcgcgctacctggcccgcggagggcctggcggacgggctgaactgcagcagctcggcgatcagggccttgcagcgctcggacagctcgaggccttcgggatagagcacgccgcgtttctggcgccggggcaggccggcgatgtccgagtcgtcgaagggcatgcacccggtgaccatgacgtagagcacgacgcccatgctccacacatcgtacttcttggggtcgtaggggatgcccaggagcacctcgggtgacgcgtaggcggctgagccgcagtaggtggtgctcaggtctgggtagccatgggcctggcggccgaagccgaagtcggtgagcttgacgcggcgctcgtccgggctcagcagcacgttttcgcacttgaggtcgcggtgcaccaggtgatgatcgtgcaggtagcgcacggcgccggcgatctgcgcaaagaggtcgcgcgcctgaactccggggatgcgcccgttgcgctgcacggcttgcagcaggtcggtggcggccgcttccatcacgatgtacagtttcccgttgcacacctcgatgaactcgaagacgtgcacgatgtgcgggtgtcgcacgccccgcaggatggacagctctcgcggcaggaacttgttgacgaagtccgggggcgctcgccgccggtccaccaccttgatggccacggtacccttgtacttcttggatgtggccaccttcaccttggagtagctgccctctccaattgtgcggcccagcttataaccgagttcgctcagaagtttgtctcccgacatggtggcgcctagggcgcacggggggcaggaggcggctgctgtcggggggcggccggactccaatctcgggtctaagccatggcgcttggcacctacacccccgcacccccatgtgcccactgccagacattggccgctgttgtgccttttattgccccgtaacaatttttgccttgtgaagtgactgcgggcgtcactccgccttagggtgggggtccgggaccccgccccggggccaccctagcctccctgctttgtgactcataatcatcctgaatggtcagtttccgatgagaggccactagcaagggatacccatcaccaccagggagcagaatccgttccagggattggggtgagtccgacttcgagcagcagctgccccccaacatcatgtacccagcccgtgactacgtggagccctgggcttcgcgtagagtccctagacggggcgaaaacgggaaaaggggccttaactggggcacctggctcctttgagagctcggagtttctgactggcctgcgcaacaccccagaggcaaggtgaacgcgagggcctataatgcaagaaccaaggcgagtcacgccctgtctgggcaaaagaggagtaaagacccctcagctgcagcccggcagcgcattcctacccagggtccgccgccagagctttcccgcgcggtcggatagttacactactgtccgggacttcctagccgtgccgcggaccatctcaagtgcttccgccacactcatcatggcggtggcagtaagtcacttccgcccgggaccggaagtgtgggatactgcgagtatggcggcgtcaaaggtgaagcaggacatgcctccgccggggggctatgggcccatcgactacaaacggaacttgccgcgtcgaggactgtcgggtcagtatcactctgcgccggggtctcagagtctgggcactcggggctcgggggcggggttccggggacacaggcgggcctcagttttcccggcggtgtgaccggaggcggagcccggggatccatcatagcttctgtaataacgctaagtgctgcagtttgttgaggtctttcccagctcctcttccttctcgtaacagcccaggaaatcggtccctctagttatttacgttttacagtgggttaaactgagtcatagcctgtgctctggccctcagccacccttggatttctaagatggggaaactgaggcccaaagaaggccgcggctccccaaggcaaagctgaggccgcaacccggaacctggagggaatttacaagatgttctatgcagtggttccctgctggcagcccccgcctgcatggtgtcacaggaatccatattctttaaattttcaattttttttttttgagacggagttttgctcttgttgcccaggctggagtgcaatggcgccatctcggctcaccgcaacctccgcctcctgggttcaagcgattctcttgcctcagcctcctgagtagctgggattacaggcatgtgccacaacgcctggctaactttgtgtttttagtagagacggggtttctccatgttggtcagggtggtctcgaactcccaacctcggatgatccgcccacctcggcctcccaaagtgctgggattacaggcgtgagccaccatgcccggcgtaaagttttcaaatgtttaagtaacacgttaaattttgttatcgggctcagcacagaaaattgaaaaagagaacttaaaaggcgcccatactcagtccccaggttaacagacaaatagaaacttttaaacgtaatctaagagtgaatacatacatttctttttttttttttaagacggtatggttctgttgcctgggctggagtgatttcttggcaacctccgcctcctgggctcaagccatcctcccaccccagcctcctgagaagctgggattacaagcatgcgcccagctttctgtattttctatagagatgggatctcgccatcttgcccaggctggtctcgaagtcctgggctcaagtgatccacccacctcggcttcccaaagtgatgggactatcggcatgagctaccgtgctcggcagaatgcatgtctcttaacaaatcaaactttacatttaaattacatgttatgcacattattcctcaattttaacacacacacaaaaatgagcatggtaattaaaaacgtaataattcagacagtagaaaaatcagtgtgaggtgaaaagtcctccccagccccttcttggtttttttattttttatttctactttttgtagagacagggtgcagctatgttgaccaggctggtctcaaactcctgggctcaagtgatcctccagcctcagcctcccaaagtgctggaattacaggcatgagccaccgcggccaacctcctcttgtttttcttgtatcccagaactgagattggcagactttttctataaaagggacagatgacaagtattttgggtttggctggccagaaagtttcagttactgagacaaccatttacaaatggaaagtgttcttagcctgggggctctacaaaaacagattgcctgtgagccaggtggctcatgcctgtaatccccacactttgggaggctgaagcgggaggatggcttgagcccaggagtttgtgaccagcctgggcaacatagtgagacccccacctctaccaaaaattaaaaaaaaaaaaaagaggcttcaggctagatctggcccatgagtgctgtcccagaacacattggaggaatataatgcattctatttcctcatttttcttttttcttttctttctttcttttttattttttgagacagagtctcattctgtcacccaggctagagtgcagtggcccgatcttggctcactgcaacctccacctcctgggttcaagcaattctcctgtctcagcctcccgagtagctgggagtacagttggatgccaccacatccggctaatttttgtatttttagtagagatggggtttcaccatattggtcagactggtctcgaactcctgacctcaggttatccacccacctcggcctcccaaagtgctaatattgcaggcacgacccaccacgcctggcgttgtttgttttttggttgttgttttttgtgtgtgtgttttttttttttagaccaggtcttgctctgtcacccaggctggagtgcagtggcgtgatctcggctcactgcaacctgtgcctcccaggttcaagcgattctcctccctcggcctccctagtatctgggattacaggtgggcgccaccatgccctgcgatttttttttttttttttttttttttttttgagatggagttttcacttttattgcccaggctagagtgcaatggtgcaatcttggctcaccgcaacctctgcctcccaggtttaagcgattctcctgtctcagcctcccgaatagctaggattacaggcatgtgccaccatgcacagctaattttttgtatttttagtagagatggggtttctccatgttggtcaggctggtctcaaactcctgacctcagatgatctgcccgccttggtctcccaaagtggtgggattacaggtgtgagccactgggcccggcctatttttttttttttttttgtatttttagtagtgacagggtttcaccatgtaggccaggctggtctcgaactcctgacctcaggtggtccccctgcctcagccgcccaaagtgctggtattacaggcatgagccaccacgcctggccgagtctcattcttctccggtgtaacctgggctaccccaccccttcaggtgtgcagcacaaggtctgtttccaaatatgcacctgtgtgacctgcagccagaccaggccacagaaggacctcaggcctggaggctccctgagctccctgcttccagcatctcatttttgtataaataccctggtcctctcccagttcaccacagagcagtggccccccctgtgccagacagtgccctaaataccactgcctggggttgtgtctcctaatggtgtggacttttgttacagcacatacacacccaccccagcctttcccggtggaggagtgaggaggatacccctatgctggtgtgctctttgtttatggccctgctttcattgttgagtgagcacatggttccgggccctgtccccaagcgctcacagctgagctgaagagatacaacacatcatgccaggatttctagttgttggtgaggcctgggataacctgggcccacttaagccaggatgtgccaggaggacctctgagaagaagcctgctctgcagaaaaagagcaaacacacaggccctgcctcctctccctctgtcctcctctcctgcctctcctgagccatggtccacagtggccttcccaccagacctaccttctgtgctcctgtccaaggcctggtggccccaagcctggcacccactcccttctgtctgcctgggtcagccattcactcactgccagcgtcccaggacatgatgggctggctcaggctgctttttgttctctttttttttttttttttttttgagacagagtcttgttctgtcactcaggctggagtgcagtggcgcgatctcagctcactgcaaggatggtctcgatctcctgacctcatgatccacctacctcaacctcccaaagtgctgggattacaggcatgagccactgcgcccggctggctcaggccccttttaatccatgccgcttctgaagtgacttcaccccacctcctccactatctcccacacccagttctcctgtccccactccctcctgagcctagcaggcagccctttccttttcatcttgtgtctttaatatatttattgaggttccaataccataccacacaactcacccatttaaagtctgtccaatttaatggctgtgagcggtggctcatgcctgtaatctcagccctttgaggacaaagcggatggatcacctgagctcaggagttggagaccaacctggccaacatggcaaaaccctgtctctactaaaaatacaaaagttagtcgggtatggtggtgcacacctgtaatcccagctacttgggaggctcaagcaggagaatcgcttgaacctggaaggcggaggttgcagtgagccaagatcttgcctctgcactccagcctgggcaacagagtaagactccatctcaaaaaaaataataataatatagtgaagtgtgtccaatttattgattttttagtatattcacaaagttgtatggccattgccatgatcagaatttagaccactttcattacccaaaagaaaccccgtcttccctattagcaatcatcccacccctggcaaacactaatctgcttccttctctgtggatttgcctgttctggccatttcctatcagtgaagtcatagaccgtgtggccttttgtttctggcaaattaatatccagcaccaagtgttgtgttttcattttttgatgggcacttgggtcatccacctactctttggctgctgtgaataatgtgagtatggctgccatgaagattcatgctgtacaggtgtttgtatggatgtagattttcatttttcccttgtgaactttcccctaagagagaaaccactggatcatatggtaacttcgtgtttaacattttgaggaactgccaaattgttttccaaattggctgcaccattttgtgcttccacctgcaatgtatgagagtcccaatttctccacgtctcaacaacactgattattttccatttttttgatcatagccaccatcctagcgcatgtgaagcggtatttcattatggtggagttttttaaaattctttttgggtctttttttgctcagttttctggtcattgatcgttgatttgcatatcactgctggctgatgatgtcgaacattttttcatgtgttttattatttttattttttattatttttttcaagagatggggcctcagtgtttcccaggctggtgtcgaactcctgggctcaagctgtcctcccgcctcagcctctcaaagtgctgagattctaggagtgaaccaccacctttgcatgtgtttattggccatttgtatgtctgtctgtgagaaacgtctattcaaatcctttatatatttttagtagggttttttgtttgtttgttcgtttgtttgttttgagatggagtcttgctctgtcgcccgggctggagtgtagtggcacgatctctgctcactgcaagctccgcctcccgggttcacgccattctcctgcctcagcttcccgagtagctgggacttcaggcacctgccactgcgcccggctaattttttgcatttttagtagagacggggtttcactgtgttagccaggatcgtctcgatctcctgacctcgtgatccgcccgcctcggcctcccaaagtgctgggattacaggtgtgagccactgcgcccggcttagtagggttttttaaattattgaattattgagttgtaagattgtgtatacatatgttgtcttctcagctaattgatagtttcatttacagcacaaaagtttttaatttcaataaagtccgggctgggcacggtggctcatgcctgtaattccagcactttggggggcagaggcaggtggatcacttgaggtcaggagtttgagaccagcctggccaatatggcaaaaccccatctctactaaaaatacaaaaattagctgggcgcggtggcgggcacctgtagtcccagctactcaggaggctgaggcaggagaatggcgtgaacccgggaggcggagcttgcagtgagccgagattgtgccactgcacttcagcctgggccacagagtgagactccatctcaaaaatacatgtataataataatttcaatgaagtccaatttctgtatttttccttttgtcacttgtgcttctggtgtcatatctaagaaacctagtttgaggtcacagagagtgacttacattttcttctaagagtattatagtttcagctcttacgcttaggtctttgatcctttttttttttttttttttgagatggagccttgctctgtcacacaggctggagtgcagtggcgcgatctaggctcactgcaagctccgcctcccgggttcacgccattctcctgcctcagcctcctgagtagcggggactacaagtgccagccaccacgcccggctaattttttgtatttttagtagagacagggtttcaccgtgttagccaggatggtctcgatctcctgacctcgtgatccgcctgccttggcctcccaaagtgctagaattacaggcgtgagccactgcgcccggcaggtctttgatccttttgagttaatttttgtggatggtataaagaaggaacgcatcctcattctttagcatgtggctgtctggttatcccatttgttgaaaagactgttttctctcccattgaattatcttggcacctttgtccaaaatcaattgaccataaatgtgagggtttatttctggactctcagttctgttccattgatgaacatctctgtcctatgccagtgccacactgtcttgtacacacagctgtgggataagttttgaaatactgaagtgtgagtctttcaactttgttctttttcaaaattgttttggctgttctggtcccttgcatttccatatgaatttcccaacctgcttgtcagtttctgcaacaggaaaagaaatggttgggattctgatggggattgcgtttcaaatctgtatcagtttgcacagcgttgccatctgcacaatgctaagtgctccaattcttgaacacaggatgggtttttatttattttggtcttctcttaagaatggccaaggccgggctcagtggctcatactggtagtcccaacactctgggaggctgaggtgggaggattgcttgaggccaggagttcaagaccagcctgggcaacatagcaagaccctgtttctatgaaaaatatatttttcttttttttttgtttttgtttttggttttgttttctgaaacaaagttttctctgtcacctaggctggagtacagtggtgccatctcagcccactgcaaccttgacttcttgggcttaagtgatactcccacttcagccacccaagtaggtgggaccacagatacgtgccaccacatctagctaatttaaaaatatgtattttgggccgggcatggtggctcatgcctgtaatcctagcactttgggaggccgaggaagatggatttacctgaggttgggagttccagaccagcctggccaacatggtgaaacctcgtctctactaaaaaatacaaaaatttagctgggcacagtggcgtgcacctgtaattccagctattcaggaagctgaggcaggaaaatcacttgaacctgggaggcggaggttgcagtgggctgagatcgcaccactgcactttagcctgggctacagagcgagactttgtctcaaaaaataaaataaaatacgtattttgtaaatgtttcactgtgttgcacaggctagttgcaaactcctagtcaagtgatcctctcacctcagcctcccaaaatgctgggattacaagcgtgagccgaaaaaatttgatcccaccactgcactccagcctggacaacagagagaggcccggtctccaaaaccaaaaacaaaaagaatggtccacacacccttttgtgcgtgcccctcaccatgttccccaccagactagcagttcctaaggcacagactctgaggcctggggccttggcccccctgtggttggcgaggaggaagagccctgtgcaggctgcatgcaaatacaagaggccctgcattgtttctgtcatctcatacatctctgttctatgccagtgccacgctgtcttgtacacacagctgtgggataagttttggaatttatttcttctttggaatttatcttacagatgggcctgcgtatgagtgcgcaggtgtgagggtgcaggttctccccaagggcccattttctgcaccagaaggctgagggcagcccaggtctgtcccctgggttctctgtagccgtggaaaataatgagatatggccgggcacggtggctcacgcctgtaatgccagcacttgcaggtggatcatgaggtcaggaggtcgtaaccagcctggccaatatggtgaaaccctgtctctactaaaaatacaaaaattagcctggcgtggtggtgggcgcctgtagtcccaactactccggaggctgaggtggaagaatcgcttgaacccaggaggcagaggttgcagtgagccaagatcttgccactgcaccccagccagggcaacagagtgagattccgtctcaaaaataaattaattaaaaaaaagaaaagaacgagatatgaccagcctgggcaatatagcaagaccccatctgtacaaaaattagttaactggacatggcacacacctggggtcccagttactcgggaggctaaagtggaaggatcacttgaacccaggagttggaggctgcattgagccatgattgcgcccctgcactccagcctgggtagcagagtgagaccttgtctcaaaaccaaaaaccaaaaaaggaaaaaaaaatgaacaaggcagctgatgaaacctcccatgtgctagacaggaggctgagagctgggagctggccctgagcaccctgggcctctccagagatgtgcctctgagcccggacccagcacaccctcattacctgtagtatggaaatgtcttagccctgacttgggcttctaacaggttaaataaccaggtacaaatttgagccagtttctcatttatctccgggtctagcagaggtgcccccgtgagctccatgctggagcagagctgaaggcagaagagcatgacaggtgcagagcagggcccggcaggcacagagtagccccagcaggcatagagcagggccagtgccctggaggcctggagatggccttgccttccacctgctggtcatttcctgggtgttgactggagcctggcctacctgagcttttcattcatcccaccaagtgcaaagcctgtccagagaagagactggggctggaaggatctggagggtgcagggtgagcctgggagccagatcccagacagcccaggcctctctgaagatcccagtgggcccccagcctgtcagtcaggattagagcaaggccccactggtgctcagtaaatattcatgatggcctaggtccttcctggggtgcagggcagggggcttcaccctgcagagccaagaggtagcacggccacccctagagtccggggggtggctgggcagcccccacagggcactgcctgtccctggcagctgtgtgcagcccccgcagggcagcacgcggaactgtggcccaggtggccgggagccaccatggacactgtcagaactgcccttccacttcagggccagcctgccgcccagggtccaaacagccttctagaacacgatggacctggggcccccctagcaaccaccatctagaccctcaggcctcctgaggttgctgcctggcttgtacctttcagaaaacccctggcatgggggcagaggtgtcacagtccaagcagcctcactcctgagaagccgccagtgtcccctgattgcagagtgggcagcgcctggagctgtggaggagggtgtctgggggcgggctggcccgctgagcagcgcctctcttcacaggctacagcatgctggccatagggattggaaccctgatctacgggcactggagcataatgaagtggaaccgtgagcgcaggtagggcccctggtgggcgttgtctgaaagtgcccccccggcgagttgtcggggtcctgtagcattccgctgttgtctgtgctggcgaggggtgaacgggccccttggacttggctgtgcaatcccaggccccagaaagtgcagatccagacccagcacttccacttctaggctctgtcctcgagatgtctccatgtctgcaatcccagcactttgggaggccaaggtgggagcattgcttgagcccaggagttcaagaccagcctgggcaacagagggaaaccctgtcctcgccaccccaaaaaatgtgtctagtgaggagggttgggacccgtggatccagattaggacaggatatgagtggggggcctgcctcgggccctctaagcaggattttgtcagaggtgaccaggctcaaaccagaccacaccaggcagtggacacacagggccagatgaactagggccaggcgcccccctctccctgtgtcacaggctgggcactccttccccacccctcccccaaccccaacgcaggccaggcaggactgggagatgggggtcattgcagggaacttggaaactgccagaaagcagggagaagaaaggaaagattgtggccccgcctgccccagcctcacacactgattattttgagatgaaggggacgtggttttgtgaggcccagagccccgtgatgaagtcaccccctcttcgtcgcgatcatcaggcagagttatttttaggataaaaaaagtttttaattgaaaagaaagtagaaagccaacagtcttgtgggcagtcacccgtgcagctgcctgcacccgccctcctctcaggctcctggtgggctctgcccacagcccttgcccttcccgcgaccctcgccctgccccctgcctgcctccccgcccccctccgcctcttcccccagcagcaccctggcccctgaggtctgtgctgcctgtgctcccccgacctagcctggtctgacctgagtgtgggtttcgggctttcacaggcgcctacaaatcgaggacttcgaggctcgcatcgcgctgttgccactgttacaggcagaaaccgaccggaggtagcaccgcaggggccaaggttgggaggtcactggccggaaggccccaggctgcagggcctgacctgcatccccgaaggtggccagaatgcacgtgggggccatcgccctgtgccgtcagctgcatcctcaggcgtggagacttagtggagacccaagggggcgaaccggaaggcttcctggaggaggaggcagcactggggttggggcaagagaaaagctaggagttggctgggggaaaaggagacagggtcggagggaggcttgaaggggtgctactaggggccctaggcaggggcccctcagggcactgaggccccacccccaccatcggccccatccccacaggaccttgcagatgcttcgggagaacctggaggaggaggccatcatcatgaaggacgtgcccgactggaaggtgggtcccggctgggagggcagaggtgccagccacggcagagacagggcctggggttggggagctcccacagctttctatagaaaccccaggaccaagggggtggtgggtgccaggtcccacaagggaaggctgtagcgcctgccacgcacaggggccactgatcctgggggatgggtcctagcaggctgtatatgggtggctgtgcctctacccataccccactgtccccacaggtgggggagtctgtgttccacacaacccgctgggtgccccccttgatcggggagctgtacgggctgcgcaccacagaggaggctctccatgccagccacggcttcatgtggtacacgtaggccctgtgccctccggccacctggatccctgcccctccccactgggacggaataaatgctctgcagacctggcctgcctgttttcctggggactgggggaaagaagggggagagggcccagctaggcaccaccggatcacatgtagcatggggacgcagcagatatgcacagggtgacctcaaaacacacctaggggctgcccctggatccactggcggcctcctctctgcctccgatatacctggactctcctgcctcccttttgaaaccatgcctgtcagcagcccacttacctctccaggctgggggcccctgggtcagctttgggtcagaccttctccacggaggtctggagagtggggggagccttgacctcccggatacaagtgatcctcccgcctcagcctcccgtgtcactgcgattacaggattacaggcgtgagccaccataccttgtgcagccctgccaattgtaggcatggcgagggtatttgtctgcggaggggctcctcgctccctgagagggaagctcagagacacggggatatctgcagggaaagtaagtcgggggaagcaaccaagattggccaggtgcctctgctgtgggctcctggcacgaaagggtgaagtccgtctgagtccaccgaccaatggtgacgcgcagcgccttcgcggcgcttcctgattggcgggcatgcagggtgggcgggagggaggagaagagggggcgtcccctccctccacggatgcgcttaaaaggcggtggcggtggcggcagcgcccggcgcccgggctcacctcggccatgagcagcgcagccggcccagacccgtcggaggcgcccgaagagcggcatttcctcaggtcagctggggagagggaagctggagacgggcatggttcccatggggccaggagcagcccgtaggaccggaggcagggtcatagctgggacagaatggggtccggggactggagacgggcacagccgggatggaggttcaacggcagaggcatgaccacggtggggaaccggaggcagggatatggccaagacgggcctgggaatcccgggaatccgagaccctcctggcatcttgctggagacactaagctgcgttgctggggaaactgcctccggggcagcccgcccctcatgaatgattcatcagcagcgctggtcgctcccccaccgaaccccaaccgtggcccacccccactctccatctctcccagggccttggagctgcagcccccacttgccgacatgggaagagcggagcttagctcaaatgctaccacctcccttgtccagaggaggaaacaggcctggggaaggcagtcatggctagagcagatttggaacgcagggcctgtttgccagaggttggtgagtttgggatctagaactggcgccgtggctgtgactctcacctcatcctcctcagcctttgtgacatgggaccccaggcaaggctgttgacctcactgtgaaccagatgcgtccaacagctcctgcccactgcccacctagcagggcacgtgtcccctcagccgatgtccagactcagtctagggaagagtgttttaggagctgtgacttcaccttggggtgaaggggtgaggtgaggggggcctcaaatgctaagtgaggggagtgagggggctctcaggggtgggtaggagctagaacgtagtggggaactggctgacgaggctggagacacagaagggcctcttaggcatggtgaggagtttggagtttgaatgttcccagagccctcgggagccatcagcaggtttgggacccggtgatgcaatctggtgttcgagttttcaaagcccccccaggctcatgttgagttttgggggcaggaggctgctgtgtgcggccaggtgatcccccgtggtggtctggtgggcagaggtgtgaggtggagagaagcaggtaggactgagagcagggtgagtgtggcatggccaccctggcctgaggtttcacctcccagaaagccccctcctggaagcatttggcgagtgtcaggcccagttccctttggacccaggccacttcaggcctcctgggtctgacagggaaatccttggggccttgaagcttctctcatctaggggccgagattcgggatagcaaaaggcaccactgaacacccccagaatcccacaacagcagaagggacctgccctgcctgccaccctccttcaccaggctccaattcccacgcagcctcccacccccaccccacagctgctgctgtgccccacccccaggttcctaacctggacgaccctctgcccacagagcccccattattctaatgaccagttagacaggaagagaatgttccaagtggctgctagaggccaaagctttgggacagaagaagaggaatgcatcgccctcccgccctccacttcctccctgcaccctcctgcgggggcagcagtcagagctgtcacaagatggaggtggaggaatgagccatgttcccagcctgccagattcctcaccccgaatgcaaacgcacctcctatgtgctttcctgggagctgcgctggcctgccccggggggactctgtctgacttcaccatgagctccttttcctcaccccgtccttcaacttcatcctatgtcagctgcagacaggctgaggtttgaatttggctctgtttactggggtgtcccagggcatgtgactttcctgccctgagtctctgtctccgtctttatgtgtggacccccgaagtgtcctcttcaccatgttcctcagtctgggatttgaggctctgcctgccctgtccgcttgatcactctgcttcagcctcccttctgccccttgaacataccaggctcctccccaccccagggccttggcttttgctattcttgcccctgcattacctgccacgatgtgccaggcctcctcctccaggaagccctcgctgactcccatcccatagcagtcctccttctcctgcactctgcctacctggccttatcatgctgcaaaattggccagagggcagacatctcccactcagagagttgaaggaaagagtctcaggattcatcccctcaaaacatccaccatctgtaggtctggctctatgtctttgttcatgtcctgtggctctggagacaccaagggggaaagacccagtttcccaacttgcttcctgcatgatcctgggcaagccactcggcttctctgaatcattagttgtttttccaacttttctaggcctggctctttttatttatgtttgtgttttttattattatcttagagacaaggtcttgttctgtcgcccaggctagagtgcagtggcgtgatcatagctcactgcagcctccacctcccagattgaagtgatcctcctgcctcagcctcctgggtcaccgggattacaggtgtccaccaccacgcccagcctagtctgaccaattgtgtaggtcacccgaatattcagttttgctccgagaggtggagacggaccccagtcattcagtgaagtggatggcagagcttcacctccagctaagtagccacattttctggcaacaaataaccttttttttttttttttttttttttttttttggagacggagcctcactctgtcacccgggctggagtgcagtggcacgatctcggctcactgcaacctctgccacccgggttcaagcgattctccaggttcaagccttagcctcctgagtagctcgtactgcaggcacccaccaccatgcctggctaattttttgtatttttagtagaaacagggtttcaccatgttgggcaggctggtctggaactcctgacctcaagtgatccacccgcctcatcctcctgaagtgctgggattacggatgtgaggcaccgcgcccggcctggccacaaataatctaattatgtcactgcccctgaaaatcggtcaccaaagggtctcatagccccaggccccaaggcctccccgctgagtgtgccatcaaacactgcagccttaaaaacccatggaccccagatgcccccagtcctgtccacccctttcagcgtcctgaagcttgttccgtggctcccactgcctgaaatcagcccatcgcccccatcgaagtccttcatgctccattcccctttcttggttccctccgccttgggagctggggacgtctaggtccggttccgtgtcccacgctttggagcagtagaaccaacgcgcggccagcgcatcttctgccaccagagggcgcccgcgcctcgggctttggctcccacaccgcggcccgccaggcctcgattcaacccgcgcgtcgcacggtgaaactgagggcatccccagctcaaggctgcagacgctactcgggggtacggggtgggagggtggcattgggaccgggttcagaagcttggcggaacatttctggctccatctgaggctctgtctctgtgtgtctctgagtgtcccatcccactctgtccccagcaccgcggaggcagccgccctggagcgggagctgctggaggattatcgctttgggcggcagcagctcgtggagctgtgcggtcatgctagtgccgtggctgtgaccaaggtacctgacccctgacccccaaccctgaccccaaccagacggccaactctcctgagctgcatgactgctgtgaccagggtggttcacccctcaagaactccctttttgcttgggcctaccccagcctgatgggtaaactgaggcccagagaggctcatggctggtgcaggccagatggggacctgagacccctggtatcagagaaggccagggtggaggttattgcagggacagtgccacgaccctggaagtgcaacccctcctgcacatgtgacccgcctgcttctgccacctcctgggtcttgggcaccagggacatctgctcctgcgatctgaacacccctaaacaaccctgttctgcaggtggggaaactgaagctcagaggtggcgaggggcctgccctgggtcagagggggatggaagcagagctgcaacccaggtgtgtctggctctggagtaaacccccacacctcgaggggccaggaggatgacacaagggtgatagcaataatcatactatggagtgcttcaccgtgcagccagcagtgctgggcatcagtttcctctgcaacagcataataaatggtactgacgagtcagtccctaaacgtgaacgcctcagaaaactgtcccatacagtcgaggctctagcgtgactgcctcctcttcctcccctgccctcctcatccccctcgcctttctcctccttcctcctcctcctgccccctcctcttaccctcctcctcctttctctctccctcctcctccccttccgcccctttcttctctcctttctccttcctctccctcctcctccccctcctcctgttctccttcctccttcccacttaccctacctcctccccatcctcctcctccccattctctccctcctcacccctcctcctctttttcttcttattaccacggtatactttttaaaaactcaatgtttttcttcatgtggacttaaatgtttgtatttccaaatgaaatagatcccgggtgaggcgcccaaaggagaaggaaaatcaaaaccccagaaagaaacccagtagtcactactcgcctggcgctcagtggccaactgtctggtttttgcactgaaagccccttgtctgtccagaagcccctcagtcccagtcttgggtcttgggctctgggcccggtgtggctgggatcgcaggcatgttcatggcaggtcaggactgcgctaagcctttggggaggatacttgaaaggggagtaatctgctgtctgtgtggttggagcttaaagtacagctggggctcaagagacacccagagtgcctgtcaggcggtggcactgtcatcgcatttgataaaggccaaactgagtctgggagagaaggggctggggccacgcagaatcagggcagggctggggccaaaatgcctggagagacagagtctgagagatacagagatggccagagacagatggagagagacagataacagagagatacagagacagccagagacaaatggagagagagacaaatggagaaagagagccagagacatacagaaagacagagacactagagtctgagagatacagacagacacagagacagccagagacagatggagagagacagagacacaaagagagccagagacacagagagtctgagagatacagacagacacagagacggccagagacggagagagacagagacagacagacagagacacagagagtctgagagatacagaaacagccagagacaggtggggagagagacatgaagagagccagagacatacagagagacagagacacacagagagacagagacacggagagtctgagagatacagagagacacagagacagccagagagagacagagaggccccagggcatcgtggctaaggttgggctcccctactccacagcctccaggaggggctgaggtctggaaacatgggcgggggtgggcccgcggtgagaaaggtggaagaatgtctgcaactcaggcggagaataaacaaaccgcactccgggcgacgggcagtggctggatgcacgtttttcctgcaccgacctggcagagcctgagaccgggcctctgcatctccagcggggaaactgaggccccaagaggcccaacccctcatccagaacagctcacctcctgtcctatcctgttgcctccaggcccaagccccatcccttcccctactccgggcctcagtttcctctccaggcaaggaggaatctggactgtgcctgtgcctttgctgtgtcccctaccaccaggcgttcccgttgcccgctctctcccggaagcagaggacggtgctggtcgtgtgtggcccggagcagaacggggcagtggggctggtctgtgcccggcacctgcgggtgtttgtaagtagcaaggaccccttcgacctcccaaagtccctgcccctgcagaaatcactgccttcttttgatagcttcccagggggacattgacgcagggccaggttatagaatatgcccagtgcttgtcccaggcagggtctggtgctggtgaccaggtcaggggagtctgaccccctcttctcccacccccaggagtatgaacccaccatcttctaccccacacgctcgctggacctgctgcatcgggacctgaccacccagtgcgagaagatggacatccccttcctgagctacctgcccactgaggtcagcgctgggtggcaagcaagggggacatggtgtgcagtggccctgggccaccctgaccctgcctgccttccccaggtgcagctcattaacgaagcctatgggctggtggtggatgccgtactgggccccggcgtggagccgggcgaggtcgggggcccctgcacccgcgcgctggccacgctcaagctgctgtccatccccctcgtgagcctggacatcccctcaggcatgccaggcagaggggggcacattggggcctggggggcttgggtggaggcccctgtgccccagctcctggtcgcccctgcctgtctgaacctcaatctccccagcttggatggacccacacttggctgaggctaagggtcacacccatccctctgatggggaagatcgaggctgccaccccaggtgaccccaggtctcctctttcctccaccccagtgcccagcccacatgccctctgcccacccctggcccagttgcctgggcagacgtgagctcactcggcaaaggccgcgcccgccctggctgccgccccatgcctgttggaaccattaggcgacaggcagacggaacaaacagccgctggccagccggaccctccgtgggggtggctggactccgggggatgtcccctggctctcgggatcccagggacatcccagcaggtgccacagagcaggggcaccaagggaggcggcgtgctgtctgatctgagtagggaggctgcaggctcagcctaggacagagagggtggctctgtcaggtcagaggggatggttaggaacctctagtctgagggtggtggctagggtcagagaaggattaaagtctgagggaggatccagtgtcttctggtgagtggccccagaatcaagtcagagataggagagaaggcaaggctcctaggctgaaagtggaggctcattcaagaggtgacggaggctgggtgcaggggtcacacctgtaatcccagcactttgggaggtcgaggtgggcgggtcacctgatgtcaggagttccagaccagcctggccaacatggcgaaacccagtctctacaaaatacaaacatttgctgggtgtagtggtgcacgcctgtagtcctagttacttgggaggctgaggcaggagaatcgcttgaacccgggaggcagaggttgctgtgagctgagatcgtgccactgcactccagcctgggcaatagagagagactgtatcttaaaaacaaacaggctgggcgcaatggctcacacccataatcctagcactttgggaggccgaggtgggcagatcacaaggtcaggagttcgagaccagcctggccaatatggtgaaactccatctctactaaatatacaaaaattagccaggcatggtggcgtgtgcctgtagtcccagctactcgggaggctgagacaggagaattgcttgaacccgtgtggcagaggttgcagtgagccgagattgcaccattgcactccagcctgggtgactgaagacagaggctgggtcagatggaggagggcgattgaatagtaggataggagcagaagcagaaagtctgagtgcagaagctctggtctgattgggagggaaacacctccaaggactgggagagacttgtctgagggcggaggcagagttctagggggcgacaagtctcaccaggacccatgtgccagagagaaaaggctgggtctgatgggggaggggaagtgggggtggggcagcaggactctggtctgagggcagaggctcagtgttggaggggagaggagaggaggcagggacaggatggactctaggctgagggcaggccaccctcccagttcccaatccccccggaccctcctccctcaggctgggacgcagagaccggcagcgattcggaggacgggctgcggcctgacgtgctggtgtctctcgcggcgcccaagcgctgcgctggccgcttctccgggcgccaccacttcgtggccggcaggttcgtgcccgatgacgtgcgccgcaagttcgctctgcgcctgccgggatacacgggcaccgactgcgtcgcggcactgtgaccgccacccgcggccacaccgcagggaccctcgccaataaacagccctcccaccaccgccgcctcgcctccgcctcctttgtgcaccgggcccgctgcgggggtgggcacactcgaagagggacttcacacggtccctgggtgatccaaggcggggagcatgagaagggcggtggagtgggacttcccgctggcctagaaaacttcagctagggctgggggcggtggctcctgcctgtaatctcagcactttgggaggctgaggctggaggatcgcttaaggccaggagtttgggaccagcctgggcaacatagcaagatcccgactctacaaattaaaagaaaaagaagaaagaaaactcgagccagaagaatggagggtagattcagggtgggactcccagactgtttggggtggcctaaagcctataggatcgaagtgagacgcgagacaggacttccagccacctaaagcgggtccgagcagcttgaggctggattccaagtgacacttccctcaggcagcttgggatgcagcttggaggactgagtgggctcggggagggagttccagcaggccacggggaacccaggacagcctgaggacggaggcacagccagacgcaccaaggggggcgacccagaggggttgctcgagcgccgtcacccagggccagggggcgtggcctgaatggggcgtggccagggcgggatctgcggtcgcatcccgcccccactctcagtcccagcggccgccagacccgccggagttggacccgagcacgccgcggagcccggaccctccctcggacgctctgccccggccatggcgtcgctgctgccactgctctgtctctgtgtcgtcgctgcgcacctggcgggggcccgaggtgaggcgcctccagcccccgcgcccagcccctgaggctcccgagggcctggcagccggccttgggtgaagccgcactcggggagagaacccagggacccacgcgcttccccggggactgggtccccttcaccagtcggatccccgcgaccacctggggcgcggagcgggcctcatccattctcttccttggctaagccgggagtgtggataagaacctagggttcctcccggggtttggactctgaatcaccggccaggtctcccaccctggaccgaaggggtcggaactggcccctcccacctaactcccacacacgcactcactccaaccgctggagaaagaaatgcccatccctggaacactcaatggggcgggggacgggcccacttctcaagtgaggagactgaggcacccagaaggaaggggcttgtctgacctcatcactctgctgggagtatcttggacagctcctatcttggagaagccagtctagattccaaggacttcccggcagctcggactgtagtacagggatggaagacagactaagggaggggcttccagcaggccaagtggatgagggggagcccagcctgagggcagaggcacagccagctgaacttgattgatctcgcggcagctgaacatagtgggagggagactctagcctaggggaactgggtggtacttgcacttccccagccggggggttagggctaggtcagagagaggtacctggctttgggggcctggtggtggtcatgggcagcgcgctggaggagagtgtatgg
